(19) United States
(12) Patent Application Publication
(10) Pub. No.: US 2020/0040347 A1
(43) Pub. Date: Feb. 6, 2020

(54) Systems and Methods for Identifying and Expressing Gene Clusters

(71) Applicant: The Board of Trustees of the Leland Stanford Junior University, Stanford, CA (US)

(72) Inventors: Brian Thomas Naughton, Mountain View, CA (US); Colin Harvey, Mountain View, CA (US); Ulrich Schlecht, Sunnyvale, CA (US); Maureen Elizabeth Hillenmeyer, Palo Alto, CA (US); Joe Horecka, Fremont, CA (US)

(73) Assignee: The Board of Trustees of the Leland Stanford Junior University, Stanford, CA (US)

(21) Appl. No.: 16/461,750

(22) PCT Filed: Nov. 16, 2017
(86) PCT No.: PCT/US2017/062100

§ 371 Date: May 16, 2019

Related U.S. Application Data
(63) Continuation-in-part of application No. 15/469,452, filed on Mar. 24, 2017.
(60) Provisional application No. 62/481,601, filed on Apr. 4, 2017.
(60) Provisional application No. 62/423,196, filed on Nov. 16, 2016.

(51) Int. Cl. C12N 15/81; C12N 15/10; G16B 10/00

(52) U.S. Cl. CPC C12N 15/81; G16B 10/00; C12N 15/1089; C12N 15/1079

(57) ABSTRACT

Methods for identifying biosynthetic gene clusters that include genes for producing compounds that interact with specific target proteins are disclosed. Some methods relate to bioinformatics methods for identifying and/or prioritizing biosynthetic gene clusters. Related systems, components, and tools for the identification and expression of such gene clusters are also disclosed.

### CROSS-REFERENCE

[0001] This application claims the benefit of U.S. Provisional Application No. 62/423,196, filed Nov. 16, 2016, U.S. Provisional Application No. 62/481,601, filed Apr. 4 2017, and U.S. Ser. No. 15/469,452, filed Mar. 24, 2017, which applications are incorporated herein by reference.

### STATEMENT AS TO FEDERALLY SPONSORED RESEARCH

[0002] This invention was made with Government support under U01 GM110706 awarded by the National Institutes of Health. The government has certain rights to the invention.

### REFERENCE TO A SEQUENCE LISTING SUBMITTED ELECTRONICALLY VIA EFS-WEB

[0003] The instant application contains a Sequence Listing which has been filed electronically in ASCII format and is hereby incorporated by reference in its entirety. Said ASCII copy, created on Nov. 9, 2017, is named 52592-702_601_SL.txt and is 1,208,543 bytes in size.

### TECHNICAL FIELD

[0004] The present disclosure generally relates to the introduction of gene clusters into host organisms for the manufacture of small molecules. In some cases, the small molecules are analogs to products produced by the organism in which the gene cluster is identified and that modulate a specific protein. More specifically, the disclosure also relates to the identification of gene clusters likely to produce products that target a specific target protein and methods of expressing gene clusters in host cells. Additionally sequences of various gene dusters are provided, together with structures of compounds produced from these gene clusters.

### BACKGROUND

[0005] “Secondary metabolites,” as used herein, are small molecules that can be produced by the expression of one or more gene clusters. Often, secondary metabolites are not critical for the survival of the organism in which the gene cluster is natively found. Secondary metabolites can be clinically valuable small molecules. Examples include: antibacterial products such as penicillin, and daptomycin; antifungal products such as amphotericin; cholesterol-lowering products such as lovastatin; anticancer products such as taxol, and eribulin; and immune-modulating products including rapamycin, and cyclosporine. In spite of the great success of secondary metabolites in the history of drug discovery, challenges of secondary metabolites in drug discovery and development can include (i) extremely low yields, (ii) limited supply, (iii) complex structures posing difficulty for structural modifications, and (iv) complex structures precluding practical synthesis. These difficulties have prompted the pharmaceutical industry to embrace new technologies in past decades, particularly combinatorial chemistry, as an alternative to natural product discovery. As a result, the percentage of new secondary metabolites being tested for use in medical treatment of humans has declined steadily since the 1940s due to a greater reliance on synthetic libraries that can be utilized in high throughput screening. Despite the pharmaceutical industry's preference for synthetic libraries, secondary metabolites possess enormous structural and chemical diversity that is unsurpassed by synthetic libraries. Most importantly, secondary metabolites are often evolutionarily optimized as drug-like molecules to target specific proteins and/or pathways.

[0006] Now, thousands of bacterial and fungal genomes have been sequenced. These organisms are known to be rich sources of secondary metabolites. These secondary metabolites are enzymatically biosynthesized by the products of one or more genes, often grouped into gene clusters. New genome sequences have revealed that traditional approaches have tapped only a fraction of the biosynthetic potential of these organisms as, on average, fewer than 10% of the biosynthetic gene clusters (BGCs) in a microbial genome are expressed in any single culture condition. Further, millions of fungal species are believed to exist in nature, but have not been cultured in the laboratory. Accordingly, the supply bottleneck for secondary metabolites can be reduced by introducing the genes utilized in the synthesis of the secondary metabolite into a microorganism that can overproduce a desired secondary metabolite or analog thereof. In this way, the vast, untapped, ecological biodiversity of microbes holds renewed promise for the discovery of novel secondary metabolites useful in one or more contexts, such as the treatment of disease.

### SUMMARY OF THE INVENTION

[0007] In some embodiments, this disclosure refers to a method for screening a plurality of compounds, the method comprising: identifying a gene cluster that includes or is within 20 kilobases of a region that encodes for a protein that is identical with or homologous to a first target protein, wherein the gene cluster comprises a region that encodes for a protein selected from the group consisting of (1) polyketide synthases and (2) non-ribosomal peptide synthetases, (3) terpene synthetases, (4) UbiA-type terpene cyclases, and (5) dimethylallyl transferases; introducing a plurality of genes from the gene cluster into a vector; introducing the vector into a host cell; expressing the proteins encoded by the plurality of genes in the host cell; and determining whether a compound that is formed or modified by the expressed proteins modulates the first target protein. In some cases, the host cell is a yeast cell. In some cases, the yeast cell is a yeast cell that has been modified to increased sporulation frequency and increased mitochondrial stability. In some cases, each gene of the plurality of genes is under the control of a different promoter. In some cases, the promoters are designed to increase expression when the host cell is in the presence a nonfermentable carbon source. In some cases, the plurality of genes are introduced into the vector via homologous recombination. In some cases, introducing the plurality of genes into the vector via homologous recombination comprises combining a first plurality of nucleotides with a second plurality of nucleotides, wherein: each polynucleotide of the first plurality of DNA polynucleotides encodes for a promoter and terminator, wherein each promoter and terminator is distinct from the promoter and terminator of other polynucleotides of the first plurality of nucleotides; and each polynucleotide of the second plurality of nucleotides includes a coding sequence, a first flanking region on the 5′ side of the polynucleotide and a second flanking region on the 3′ side of the polynucleotide; and introducing the polynucleotides into a host cell that includes machinery for homologous recombination, wherein the host cell assembles the expression vector via homologous recombination that occurs in the flanking regions of the second plurality of polynucleotides; wherein the expression vector is configured to facilitate simultaneous production of a plurality of proteins encoded by the second plurality of nucleotides. In some cases, the first flanking region and the second flanking region are each between 15 and 75 base pairs in length. In some cases, the first flanking region and the second flanking region are each between 40 and 60 base pairs in length. In some embodiments, the present disclosure provides a method for identifying a gene cluster capable of producing a small molecule for modulating a first target protein, the method comprising: selecting, from a database comprising a list of biosynthetic gene clusters, one or more gene clusters that include or are positioned proximal to a region that encodes a protein that is identical with or homologous to the first target protein. In some cases, the one or more gene clusters are selected from the group consisting of (1) clusters that comprise one or more polyketide synthases and (2) clusters that comprise one or more non-ribosomal peptide synthetases, (3) clusters that comprise one or more terpene synthases, (4) clusters that comprises one or more UbiA-type terpene cyclases, and (5) clusters that comprise one or more dimethylallyl transferases. In some cases, the protein that is encoded by the region that is included in or positioned proximal to the biosynthetic gene cluster is identical to or has greater than 30% homology to the first target protein. In some cases, the region that encodes the protein that is identical with or homologous to the first target protein is within 20,000 base pairs of a region of a portion of the gene cluster that encodes a polyketide synthase, a non-ribosomal peptide synthetase, a terpene synthetase, a UbiA-type terpene cyclase, or a dimethylallyl transferase. In some cases, the first target protein is BRSK1. In some cases, selecting the one or more gene clusters comprises operating a computer, wherein operation of the computer comprises running an algorithm that takes into account both an input sequence for the first target protein and sequence information from a database that includes sequence information from a plurality of species such that the computer returns information corresponding to one or more gene clusters. In some cases, the algorithm takes into account the phylogenetic relationship between gene clusters in the database. In some cases, the one or more gene clusters include a coding sequence for a protein that is an extracellular protein, a membrane-tethered protein, a protein involved in a transport or secretion pathway, a protein homologous to a protein involved in a transport or secretion pathway, a protein with a peptide targeting signal, a protein with a terminal sequence with homology to a targeting signal, an enzyme that degrades small molecules, or a protein with homology to an enzyme that degrades small molecules. In some embodiments the present disclosure provides a method for producing a compound that modulates the first target protein, the method comprising: identifying a gene cluster (e.g., via methods disclosed herein), expressing the gene cluster or a plurality of genes from the gene cluster in a host cell, and isolating a compound produced by the gene cluster. In some cases, the method further comprises screening the isolated compound for modulation of an activity of the first target protein. In some cases, the cluster-encoded protein that is homologous to the first target protein is resistant to modulation by the isolated compound when compared to modulation of the first target protein. In some cases, the compound is not toxic to the species from which the cluster originates due to one or more of (1) sequence differences between target protein and the cluster-encoded protein, (2) spatial separation of the compound from the cluster-encoded protein and (3) high expression levels for the cluster-encoded protein.

[0008] In some embodiments the present disclosure provides a method for making a DNA vector, the method comprising: identifying a gene cluster comprising a plurality of genes that are capable of producing a small molecule for modulating a first target protein; introducing two or more genes of the plurality of genes into a vector, wherein the vector is configured to facilitate expression of the two or more genes in a host organism; wherein (1) the gene cluster encodes one or more proteins selected from the group consisting of a polyketide synthase, a non-ribosomal peptide synthetase, a terpene synthetase, a UbiA-type terpene cyclase, and a dimethylallyl transferase and (2) the gene cluster includes or is positioned proximal to a region that encodes a protein that is identical with or homologous to the first target protein. In some cases, the DNA vector is a circular plasmid. In some cases, the DNA vector comprises a plurality of promoters, wherein each promoter of the plurality of promoters is configured to, when the vector is introduced into a Saccharomyces cerevisiae cell, promote a lower level of heterologous expression when the cell exhibits predominantly anaerobic energy metabolism than when the cell exhibits aerobic energy metabolism. In some cases, each promoter of the plurality of promoters differs in sequence from one another. In some cases, each promoter of the plurality of promoters has a sequence selected from the group consisting of: SEQ ID NOs: 1-66. In some cases, each promoter of the plurality of promoters has a sequence selected from the group consisting of: SEQ ID NOs: 20-35, and SEQ ID NOs: 41-50. In some cases, when the Saccharomyces cerevisiae cell is exhibiting anaerobic energy metabolism, the cell is catabolizing a fermentable carbon source selected from glucose or dextrose; and when the Saccharomyces cerevisiae cell is exhibiting aerobic energy metabolism, the cell is catabolizing a non-fermentable carbon source selected from ethanol or glycerol.

[0009] In some embodiments the present disclosure provides a method for the heterologous expression of a plurality of genes in a yeast strain, the method comprising: obtaining a yeast strain that includes a vector for expressing a plurality of genes from a single gene cluster of a non-yeast organism; and inducing expression of the plurality of genes; wherein the gene cluster in the non-yeast organism includes or is positioned proximal to a region that encodes a protein that is at least 30% homologous to a target protein. In some cases, the method further comprises introducing the plurality of genes from the single gene cluster into the vector. In some cases, the method further comprises introducing the vector into the yeast strain. In some cases, expression of the plurality of genes results in the formation of small molecule, wherein the small molecule modulates the activity of the target protein. In some cases, the gene cluster is a gene cluster of a non-yeast fungus. In some cases, the yeast strain is from Saccharomyces cerevisiae. In some cases, the target protein is a human protein.

[0010] In some embodiments the present disclosure provides a system for identifying a gene cluster for introduction of a plurality of genes from the gene cluster into a host organism, the system comprising: a processor; a non-transitory computer-readable medium comprising instructions that, when executed by the processor, cause the processor to perform operations, the operations comprising: loading the identity or sequence of a first target protein into memory; loading the identity or sequence of a plurality of biosynthetic gene clusters into memory; identifying, from the plurality of biosynthetic gene clusters, one or more gene clusters that encode or are positioned proximal to a region that encodes a protein that is identical with or homologous to the first target protein; and scoring the one or more gene clusters based on the likelihood of each gene cluster being capable of use to produce a small molecule that modulates the first target protein. In some cases, scoring the one or more gene clusters comprises comparing the sequence of the first target protein (or a DNA sequence encoding the first target protein) to a sequence of a protein encoded in or proximal to the gene cluster (or to a DNA sequence encoding the protein that is in or proximal to the gene cluster).

[0011] In some embodiments the present disclosure provides a system for identifying one or more biosynthetic gene clusters for introduction into a host organism to produce one or more compounds that modulate a specific target protein, the system comprising: a processor; a memory containing a gene cluster identification application; wherein the gene cluster identification application directs the processor to: load data describing at least one target protein into the memory; load data describing a plurality of biosynthetic gene clusters into the memory; score each of the plurality of biosynthetic gene clusters based upon: performing a homolog search for each biosynthetic gene cluster to determine a presence of at least one homolog of a target protein within or adjacent the biosynthetic gene cluster; confidence of homology of the at least one target protein to at least one gene in a biosynthetic gene cluster; a fraction of a homologous gene that meets an identity threshold; a total number of genes homologous to the at least one target protein present in the entire genome of an organism; homology of the at least one homolog of at least one target protein within or adjacent the biosynthetic gene cluster to genes in the target protein's genome; phylogenetic relationship of the at least one target protein to a gene in a cluster; expected number of homologs of the at least one target protein in or adjacent to a biosynthetic cluster; and a likelihood that at least one target protein is essential for cellular process in the natural environment; and output a report identifying one or more biosynthetic gene clusters that are most likely to produce a compound that modulates the at least one target protein.

[0012] In some embodiments the present disclosure provides a method for selecting a biosynthetic gene cluster that produces a secondary metabolite, the method comprising: obtaining a list of gene clusters; performing a phylogenetic analysis of the genes within the clusters compared to known genes from known biosynthetic gene clusters; and selecting the biosynthetic gene cluster based on its phylogenetic relationship with the known genes. In some cases, the biosynthetic gene cluster with the most distant phylogenetic relationship from the known genes is selected.

[0013] In some embodiments the present disclosure provides a method for identifying a gene cluster that produces a compound that binds a protein of interest, the method comprising: obtaining sequence information for a plurality of contiguous sequences, wherein each contiguous sequence includes a biosynthetic gene cluster and flanking genomic sequences; analyzing the contiguous sequences for the presence of a gene that encodes a protein with homology to the protein of interest, and selecting a biosynthetic gene cluster which includes, or is proximal to, a gene that encodes a protein that is homologous to the protein of interest. In some cases, the contiguous nucleotide sequence is less than 40,000 base pairs in length.

[0014] In some embodiments, the present disclosure provides a modified yeast cell having a BY background, wherein relative to unmodified BY4741 and BY4742, the modified yeast cell has both (1) increased sporulation frequency and (2) increased mitochondrial stability. In some cases, the modified yeast cell grows faster on non-fermentable carbon sources than unmodified BY4741 and BY4742. In some cases, the yeast cell comprises one or more of the following genotypes: MKT1(30G), RME1(INS-308A), and TAO3(1493Q). In some cases, the yeast cell comprises one or more of the following genotypes: CAT5(91M), MIP1(661T), SAL1+, and HAP1+. In some embodiments the present disclosure provides a method of forming an expression vector, the method comprising: combining a first plurality of DNA polynucleotides with a second plurality of polynucleotides, wherein: each polynucleotide of the first plurality of DNA polynucleotides encodes for a promoter and terminator, wherein each promoter and terminator is distinct from the promoter and terminator of other polynucleotides of the first plurality of nucleotides; and each polynucleotide of the second plurality of nucleotides includes a coding sequence, a first flanking region on the 5′ side of the polynucleotide and a second flanking region on the 3′ side of the polynucleotide, wherein each flanking region is between 15 and 75 base pairs in length; and introducing the polynucleotides into a host cell that includes machinery for homologous recombination, wherein the host cell assembles the expression vector via homologous recombination that occurs in the flanking regions of the second plurality of polynucleotides; wherein the expression vector is configured to facilitate simultaneously production of a plurality of proteins encoded by the second plurality of nucleotides. In some cases, the host cell is a yeast cell. In some cases, each flanking region is between 40 and 60 base pairs in length. In some cases, at least one polynucleotide of the first plurality of nucleotides encodes a selection marker.

[0015] In some embodiments, the present disclosure provides a system for generating a synthetic gene cluster via homologous recombination, the system comprising 1 though N unique promoter sequences, 1 through N unique terminator sequences, and 1 through N unique coding sequences, wherein: coding sequence 1 is attached to an additional 30-70 base pair sequence on each end such that a first end portion is identical to the last 30-70 base pairs of promoter 1 and a second end portion is identical to the first 30-70 base pairs of terminator 1; coding sequence 2 is attached to an additional 30-70 base pair sequence on each end such that a first end portion is identical to the last 30-70 base pairs of promoter 2 and a second end portion is identical to the first 30-70 base pairs of terminator 2; and coding sequence N is attached to an additional 30-70 base pair sequence on each end such that a first end portion is identical to the last 30-70 base pairs of promoter N and a second end portion is identical to the first 30-70 base pairs of terminator N. In some cases, terminator 1 and promoter 2 are portions of the same double-stranded oligonucleotide.

[0016] In some embodiments, the present disclosure provides a method for assembling a synthetic gene cluster, the method comprising: obtaining 1 through N unique promoters, 1 through N unique terminators, and 1 through N unique coding sequences, wherein: coding sequence 1 is attached to an additional 30-70 base pair sequence on each end such that a first end portion is identical to the last 30-70 base pairs of promoter 1 and a second end portion is identical to the first 30-70 base pairs of terminator 1; coding sequence 2 is attached to an additional 30-70 base pair sequence on each end such that a first end portion is identical to the last 30-70 base pairs of promoter 2 and a second end portion is identical to the first 30-70 base pairs of terminator 2; and coding sequence N is attached to an additional 30-70 base pair sequence on each end such that a first end portion is identical to the last 30-70 base pairs of promoter N and a second end portion is identical to the first 30-70 base pairs of terminator N; transforming the 1 through N promoters, terminators and coding sequences into a yeast cell; isolating a plasmid containing the 1 through N promoters, terminators and coding sequences from the yeast cell. In some cases, the method further comprises a coding sequence for a selection marker. In some cases, the selection marker is an auxotrophic marker. In some cases, the yeast cell has a deficiency in a DNA ligase gene.

[0017] In some embodiments the present disclosure provides a yeast strain which allows for both (1) homologous DNA assembly and (2) production of heterologous genes in the same strain. In some cases, the yeast strain is a DHY strain. In some cases, the strain allows DNA assembly via homologous recombination with an efficiency of at least 80% as compared to DNA assembly in BY. In some cases, production of heterologous compounds in the strain is accomplished with an efficiency of at least 80% as compared to heterologous compound production in BJ5464. In some cases, the strain allows production of heterologous proteins with an efficiency of at least 80% as compared to heterologous protein production in BJ5464.

[0018] In some embodiments the present disclosure provides a method for isolating a plasmid from a yeast cell, the method comprising: isolating total DNA from a yeast cell that includes a plasmid; incubating the DNA with an exonuclease such that the exonuclease degrades substantially all of the linear DNA in the isolated total DNA from the yeast cell; optionally inactivating the exonuclease; and recovering the plasmid DNA. In some cases, the isolated plasmid DNA is of sufficient purity for use in a sequencing reaction. In some cases, the plasmid DNA is further prepared for a sequencing reaction.

[0019] In some embodiments, the present disclosure provides pharmaceutical composition comprising Compound 6 and a pharmaceutically acceptable excipient. In some embodiments, the present disclosure provides pharmaceutical composition comprising Compound 7 and a pharmaceutically acceptable excipient. In some embodiments, the present disclosure provides pharmaceutical composition comprising Compound 8 and a pharmaceutically acceptable excipient. In some embodiments, the present disclosure provides pharmaceutical composition comprising Compound 9 and a pharmaceutically acceptable excipient. In some embodiments, the present disclosure provides pharmaceutical composition comprising Compound 10 and a pharmaceutically acceptable excipient. In some embodiments, the present disclosure provides pharmaceutical composition comprising Compound 11 and a pharmaceutically acceptable excipient. In some embodiments, the present disclosure provides pharmaceutical composition comprising Compound 12 and a pharmaceutically acceptable excipient. In some embodiments, the present disclosure provides pharmaceutical composition comprising Compound 13 and a pharmaceutically acceptable excipient. In some embodiments, the present disclosure provides pharmaceutical composition comprising Compound 14 and a pharmaceutically acceptable excipient. In some embodiments, the present disclosure provides pharmaceutical composition comprising Compound 15 and a pharmaceutically acceptable excipient. In some embodiments, the present disclosure provides pharmaceutical composition comprising Compound 16 and a pharmaceutically acceptable excipient. In some embodiments, the present disclosure provides method of producing Compound 3, the method comprising: providing a vector or vectors comprising the coding sequences of SEQ ID NOs: 200-206; transforming a host cell with the vector or vectors; incubating the host cell in culture media under conditions suitable for the expression of the coding sequences; and isolating the compound produced by the host cell.

### INCORPORATION BY REFERENCE

[0020] All publications, patents, and patent applications mentioned in this specification are herein incorporated by reference to the same extent as if each individual publication, patent, or patent application was specifically and individually indicated to be incorporated by reference.

### BRIEF DESCRIPTION OF THE DRAWINGS

[0021] The written disclosure herein describes illustrative embodiments that are non-limiting and non-exhaustive. Reference is made to certain of such illustrative embodiments that are depicted in the figures, in which:

[0022] FIG. 1A illustrates strategies that may be used to obtain a secondary metabolite from a fungal strain given different properties of the fungal strain.

[0023] FIG. 1B illustrates examples of characterized gene clusters which produce known chemicals and a novel gene cluster with a product.

[0024] FIG. 2 illustrates a phylogenetic analysis of enzymes that produce secondary metabolites.

[0025] FIG. 3 illustrates self-resistance mechanisms for potentially toxic secondary metabolites.

[0026] FIG. 4 illustrates a gene cluster that produces lovastatin.

[0027] FIG. 5A illustrates an exemplary process to extract and utilize compound products in accordance with an embodiment of the invention.

[0028] FIG. 5B illustrates an exemplary process to produce and extract heterologous, biosynthetic compound products in accordance with an embodiment of the invention.

[0029] FIG. 5C illustrates an example production pipeline for producing secondary metabolites from gene clusters.

[0030] FIG. 5D illustrates an example work flow for producing secondary metabolites from gene clusters.

[0031] FIG. 6A illustrates a yeast phase chart displaying yeast cell concentration in relation to time to provide reference for various embodiments of the disclosure.

[0032] FIG. 6B illustrates a yeast phase chart displaying glucose or dextrose concentration in relation to time to provide reference for various embodiments of the disclosure.

[0033] FIG. 6C illustrates a yeast phase chart displaying ethanol or glycerol concentration in relation to time to provide reference for various embodiments of the disclosure.

[0034] FIG. 7A illustrates a DNA vector having a production-phase promoter in accordance with an embodiment of the disclosure.

[0035] FIG. 7B illustrates a DNA vector having multiple production-phase promoters in accordance with an embodiment of the disclosure.

[0036] FIG. 8A illustrates a DNA expression vector having a production-phase promoter within an expression cassette in accordance with an embodiment of the disclosure.

[0037] FIG. 8B illustrates a DNA expression vector having multiple production-phase promoters, each within an expression cassette in accordance with an embodiment of the disclosure.

[0038] FIG. 9 illustrates a method to construct and utilize production-phase promoter DNA vectors in accordance with various embodiments of the disclosure.

[0039] FIG. 10A illustrates an overview of an approach involving yeast homologous recombination assembly.

[0040] FIG. 10B illustrates the homologous recombination in yeast of the parts from FIG. 10A.

[0041] FIG. 10C illustrates the plasmid which results from the parts of FIG. 10A, homologously recombined as in FIG. 10B.

[0042] FIG. 10D illustrates improved sequencing results obtained via disclosed methods.

[0043] FIG. 10E illustrates assembly of plasmid DNA from up to 14 individual fragments.

[0044] FIG. 11A illustrates improved assembly efficiency in a background lacking the DNL4 ligase.

[0045] FIG. 11B illustrates equivalent sequencing efficiencies using DNA prepared from both colonies (red) and liquid cultures (blue) for four test assemblies.

[0046] FIG. 11C illustrates sequencing efficiencies observed using both standard and modified NexteraXT library preparation methods.

[0047] FIG. 11D illustrates a workflow for sequencing plasmids from yeast via a step of transforming the plasmids into E. coli.

[0048] FIG. 11E illustrates a workflow for sequencing plasmids from yeast in accordance with methods described herein.

[0049] FIG. 12 illustrates repaired SNPs in yeast strain DHY674 relative to BY4741.

[0050] FIG. 13 illustrates DHY213, BJ5464, and X303 (a W303 derivative) grown on glucose (fermentation) and ethanol/glycerol (respiration) media.

[0051] FIG. 14A illustrates relative growth rates of strains described here in YPD culture. The dotted line denotes the diauxic shift (the point at which the culture exhausts all glucose and transitions from fermentation to respiration). The DHY derived strain JHY692 shows significantly improved growth in the respiration phase of the culture.

[0052] FIG. 14B illustrates expression of eGFP driven by the PADH2 promoter in the strains from FIG. 14A.

[0053] FIG. 14C illustrates expression of eGFP driven by the PPCK1 promoter in the strains from FIG. 14A.

[0054] FIG. 15A illustrates an example gene cluster.

[0055] FIG. 15B illustrates a polyketide produced by a 5-gene gene cluster.

[0056] FIG. 16 is a heat map graphic generated in accordance with various embodiments of the disclosure with data of expression of enhanced-green fluorescent protein driven by various S. cerevisiae promoters.

[0057] FIG. 17 is a data graph of enhanced-green fluorescent protein expression driven by various S. cerevisiae promoters.

[0058] FIG. 18 illustrates fluorescence intensity of 10⁵ cells expressing enhanced-green fluorescent protein driven by various promoters.

[0059] FIG. 19 illustrates a phylogenetic tree of Saccharomyces sensu stricto subgenus.

[0060] FIG. 20 illustrates a multiple sequence alignment of various Saccharomyces sensu stricto species' upstream activating sequences in ADH2 promoters.

[0061] FIG. 21 illustrates homology between various Saccharomyces sensu stricto species' ADH2 promoters.

[0062] FIG. 22 is a heat map graphic generated in accordance with various embodiments of the disclosure with data of expression of enhanced-green fluorescent protein driven by various S. sensu stricto ADH2 promoters.

[0063] FIG. 23 is a data graph of enhanced-green fluorescent protein expression driven by various S. sensu stricto ADH2 promoters.

[0064] FIG. 24 illustrates four multi-gene expression vector constructs and a data graph of the resultant compound production, in accordance with an embodiment of the invention.

[0065] FIG. 25 illustrates a biosynthetic process that produces the compound emindole SB via a fungal four-gene cluster.

[0066] FIG. 26 is a data graph of the production results of two product compounds generated.

[0067] FIG. 27A illustrates two plasmid vector constructs in accordance with an embodiment of the disclosure.

[0068] FIG. 27B illustrates a further vector construct in a yeast cell in accordance with an embodiment of the disclosure.

[0069] FIG. 28A illustrates a phylogenetic analysis of further gene clusters. Abbreviations used may include Adenylation domain (A), a,b-hydrolase (a,b-h), ATP-binding cassette transporter (ABC), Acyl carrier protein (ACP), Alcohol dehydrogenase (ADH), Aldo-keto reductase (AK-red), Aminooxidase (AmOx), Aminotransferase (AmT), Arylsulfotransferase (ArST), Acyltransferase domain (AT), C-mehtyltransferase (cMT), Terpene cyclase (Cyc), Dehydratase (DH), Domain of unknown function 4246 (DUF4246), Flavin adenine dinucleotide (FAD) binding protein (FAD), Iron dependent alcohol dehydrogenase (Fe-ADH), Flavin-dependent monooxygenase (FMO), Geranyl-geranyl pyrophosphate synthase (GGPPS), Glycosidase (glycos.), Glucose-methanol-choline oxidoreductase (GMC), Halogenase (Halo), Highly reducing polyketide synthase (HR-PKS), Hypothetical protein (Hyp), Indole-3-acetic acid-amido synthetase (IAS), Ketosynthase domain (KS), metallo-B-lactamase (mBla), Mitochodrial phosphate carrier protein (MCP), Major facilitator superfamily transporter (MFS), Metallohydrolase (MH), Methyl transferase (MT), Nicotine adenine dinucleotide dependent dehydrogenase (NAD-DH), Nicotine adenine dinucleotide phosphate (NADP) dependent reductase (NADP-R), N-mehtyltransferase (nMT), Non reducing polyketide synthase (NR-PKS), O-succinylhomoserine sulfhydrylase (O-suc-SH), O-methyltransferase (oMT), Oxidoreductase (OxR), Cytochrome p450 (p450), Dipeptidyl peptidase (Pep), Prenyl transferase (PrT), Product template domain (PT), Riboflavin biosynthesis protein RibD (RibD), RNA helicase (RNAh), starter unit:ACP transacylase domain (SAT), Short-chain dehydrogenase (SDH), Short-chain dehydrogenase/reductase (SDR), Serine hydrolase (SH), Sugar transport protein (ST), Thiolation domain (T), Terminal domain (TD), Thioesterase domain (TE), Transcription factor (TF), and UbiA-type terpene cyclase (UTC).

[0070] FIG. 28B illustrates various gene clusters and biosynthetic compound products in accordance with various embodiments of the invention.

[0071] FIG. 28C illustrates various gene clusters and biosynthetic compound products in accordance with various embodiments of the invention.

[0072] FIG. 28D illustrates various gene clusters and biosynthetic compound products in accordance with various embodiments of the invention.

[0073] FIG. 28E illustrates various gene clusters and biosynthetic compound products in accordance with various embodiments of the invention.

[0074] FIG. 28F illustrates various gene clusters and biosynthetic compound products in accordance with various embodiments of the invention.

[0075] FIG. 29A illustrates a phylogenetic analysis of gene clusters.

[0076] FIG. 29B illustrates correction of a gene cluster.

[0077] FIG. 30A illustrates schematics of PKS enzyme containing BGCs examined herein.

[0078] FIG. 30B illustrates schematics of UTC containing BGCs examined herein.

[0079] FIG. 31 illustrates a volcano plot of all spectral features identified in the automated analysis of strains expressing PKS containing BGCs. All features determined to be specific to the BGC expressing strain were identified by comparison to a negative vector control.

[0080] FIG. 32 illustrates features produced by BGC PKS1.

[0081] FIG. 33 illustrates features produced by BGC PKS2.

[0082] FIG. 34 illustrates features produced by BGC PKS4.

[0083] FIG. 35 illustrates features produced by BGC PKS6.

[0084] FIG. 36 illustrates features produced by BGC PKS8.

[0085] FIG. 37 illustrates features produced by BGC PKS10.

[0086] FIG. 38 illustrates features produced by BGC PKS13.

[0087] FIG. 39 illustrates features produced by BGC PKS14.

[0088] FIG. 40 illustrates features produced by BGC PKS15.

[0089] FIG. 41 illustrates features produced by BGC PKS16.

[0090] FIG. 42 illustrates features produced by BGC PKS17.

[0091] FIG. 43 illustrates features produced by BGC PKS18.

[0092] FIG. 44 illustrates features produced by BGC PKS20.

[0093] FIG. 45 illustrates features produced by BGC PKS22.

[0094] FIG. 46 illustrates features produced by BGC PKS23.

[0095] FIG. 47 illustrates features produced by BGC PKS24.

[0096] FIG. 48 illustrates features produced by BGC PKS28.

[0097] FIG. 49 illustrates NMR data and structure of Compound 6.

[0098] FIG. 50 illustrates NMR data and structure of Compound 7.

[0099] FIG. 51 illustrates NMR data and structure of Compound 8.

[0100] FIG. 52 illustrates NMR data and structure of Compound 9.

[0101] FIG. 53 illustrates NMR data and structure of Compound 10.

[0102] FIG. 54 illustrates NMR data and structure of Compound 11.

[0103] FIG. 55 illustrates NMR data and structure of Compound 12.

[0104] FIG. 56 illustrates NMR data and structure of Compound 13.

[0105] FIG. 57 illustrates NMR data and structure of Compound 14.

[0106] FIG. 58 illustrates NMR data and structure of Compound 15.

[0107] FIG. 59 illustrates NMR data and structure of Compound 16.

### DETAILED DESCRIPTION

[0108] Systems and methods in accordance with various embodiments of the disclosure identify, refactor, and express biosynthetic gene clusters in host organisms to produce secondary metabolites. Systems and methods in accordance with various embodiments of the disclosure utilize host organisms to produce secondary metabolites. Using host organisms allows for production of secondary metabolites from biosynthetic gene clusters regardless of whether the native host cell can be cultured, or whether the cluster is expressed in the native host, see FIG. 1A. In some cases, the secondary metabolites may bind to one or more specific proteins. In some embodiments, the host organism ordinarily does not produce the secondary metabolite. The host organism obtains the ability to produce the secondary metabolite due to the introduction of a biosynthetic gene cluster identified using a cluster identification process performed in accordance with an embodiment of the disclosure. In one embodiment, a cluster identification process identifies a biosynthetic gene cluster that possesses characteristics suggesting that it is responsible for producing a secondary metabolite with novel chemistry. In another embodiment, a cluster identification process (discussed further below) identifies a biosynthetic gene cluster that possesses characteristics suggesting that it is responsible for producing a secondary metabolite that binds to a specific protein of interest. In some embodiments this disclosure provides the inclusion of a biosynthetic gene cluster identified using a cluster identification process, in accordance with various embodiments of the disclosure, within a host organism enabling the host organism to express a secondary metabolite. In some cases, the secondary metabolite produced in the host cell may be identical to a secondary metabolite that is naturally produced by the organism in which the biosynthetic gene cluster was originally identified. In some cases, the secondary metabolite produced by the host cell is an analog of a secondary metabolite produced by the organism from which the cluster was identified. In other cases, the secondary metabolite produced in the host cell may be structurally distinct from the secondary metabolite produced by the cluster in the originating species. Differences in the product produced may arise from differences in expression and localization of the coding sequences from the cluster. Additionally coding sequences, or expression products thereof, from the cluster may interact with other coding sequences, or expression products thereof, not contained in the cluster. Host cell produced secondary metabolites which are distinct from those produced in the originating species of the cluster may be termed non-naturally occurring secondary metabolites or non-natural secondary metabolites. The secondary metabolite produced by the host organism can be isolated and then can be used, for example, in a treatment. In some cases, the secondary metabolites may be used in a treatment of a disease or disorder which involves aberrant activity of a specific protein. This disclosure also describes a panel of sesquiterpenoid and polyketide products.

### Cluster Identification

[0109] Cluster identification processes, in accordance with many embodiments of the disclosure, utilize specific properties of a biosynthetic gene cluster to identify gene clusters of interest from sequence data. Sequence data used with the methods of this disclosure may comprise genomic sequence data, transcriptome sequence data, or other sequence data. In some cases, sequence data may be generated by sequencing a DNA sample obtained from an environmental sample. In other cases, sequence data may be obtained from publically available genome sequence libraries, or may be purchased. Genome sequences may be derived from any organism. In some cases, genome sequences may be derived from a fungal, bacterial, archaeal or plant species.

[0110] In some cases, the genome sequences may be derived from fungi. In some cases, the genome sequences may be derived from fungi which are poorly characterized or difficult to culture. In some cases, the genome sequences may be derived from fungi which are well characterized, or partially characterized. Examples of types of fungi from which sequences may be derived include fungi from one of the following Phyla: Basidiomycota, Ascomycota, Neocallimastigomycota, Blastocladiomycota, Glotneromycota, Chytridiomycota and Microsporidia. Examples of fungal species which may be the source of sequence data include, but are not limited to: Aspergillus tubingensis, Hypomyces subiculosus, Coniothyrium sporulosum, Acremonium Sp. KY4917, Aspergillus niger, Thielavia terrestris, Trichoderma vixens, Pseudogymnoascus pannorum, Scedosporium apiospermum, Metarhizium anisopliae, Cochliobolus heterostrophus, Verruconis gallopava, Moniliophthora roreri, Punctularia strigosozonata, Hydnomerulius pinastri, Arthroderma gypseum, Setosphaeria turcica, Pyrenophora teres, Cladophialophora yegresit, Talaromyces cellulolyticus, Endocarpon pusillum, Hypholoma sublateritium, Ceriporiopsis subvermispora, Botryotonia cinerea, Formitiporia mediterranea, Heterobasidion annosum, Ge/atoporia subvermispora, Dichomitus squalens, Pleurotus ostreatus, Schizophyllum commune, Stereum hirsutum, Sternum hirsutum, and Dacryopinax primogenitus.

[0111] Provided in FIG. 1B is a flow chart showing a process embodiment that can be implemented using computer systems for identifying and ranking BSGs that are likely to produce secondary metabolites capable for anthropogenic use (e.g., medicinal). As shown, Process 1000 can begin by obtaining genetic sequence data from a biological source or sequence database (1001). In some cases, the sequence data may be derived from single cell sequencing of a fungal cell of unknown species. For example an environmental sample may contain many different cells which may be separated and sequenced. In some cases, the sequence data is obtained from a publically available genetic data library, or may be purchased. Often the genetic sequence data is a genomic sequence of an organism, however, any genetic data sequence, including partial genome sequence data, may be used.

[0112] Process 1000 also identifies biosynthetic gene clusters (1003). Clusters may be identified using bioinformatics methods to scan genome sequences. Characteristics of a gene cluster may include a grouping of two or more genes within about 5 kb, 10 kb, 15 kb, 20 kb, 25 kb, 30 kb, 35 kb, 40 kb or 45 kb of each other. Genes may be bioinformatically identified by the presence of known promoter sequences, transcription initiation sequences, or homology to known genes or gene features. The term homology as used herein refers to sequences with high sequence identity, for example a sequence identity of at least about 50%, 60%, 70%, 80%, 90%, 95%, 97%, 98%, 99% or more than 99%. Sequence identity may be determined using alignment tools such as Basic Local Alignment Search Tool (BLAST), available via the National Center for Biotechnology Information (NCBI), to determine areas of conserved sequence. Biosynthetic gene clusters may be identified using a bioinformatics tool, such as ClustScan, SMURF, CLUSEAN, and/or antiSMASH.

[0113] Biosynthetic gene clusters typically contain one or more core biosynthetic genes and one or more tailoring genes. Clusters which contain the same, or highly similar, core enzymes with different tailoring genes may produce quite different compounds, as seen in FIG. 1C. Expressing a subset of genes from a cluster may also result in production of a different compound compared with the compound produced by expression of all the genes in the cluster.

[0114] Process 1000 also scores and/or ranks gene clusters utilizing various factors (1005). In some cases, scores and rankings are based on the type of secondary metabolite to be produced. In other cases, scores and rankings are based on a protein or domain existing within the cluster. In even more cases, the level of homology of a particular protein within the cluster to a protein of interest is considered. It should be understood that many different factors can be used, as determined by the application and use of the biosynthetic gene cluster data.

[0115] An embodiment of a process for identifying biosynthetic gene clusters using computer systems is provided in FIG. 1D. Process 2000 can begin with obtaining genetic sequence data of an organism having gene clusters (2001). In many cases, the genetic sequence data is a genomic sequence of an organism. In other cases, the genetic data sequence is a partial genome sequence data. In addition to genetic sequence data, Process 2000 also obtains target sequence data keying to biosynthetic gene clusters of interest (2003). The target sequence is any sequence the user wishes to define and identify clusters. In some cases, the target sequence is a particular protein domain of interest. In other cases, the target sequence is a particular protein, protein homolog or protein class.

[0116] In some embodiments, clusters are scanned for the presence of genes encoding proteins known to be involved in biosynthetic pathways. Key proteins involved in biosynthetic pathways include terpene synthases, polyketide synthases (PKSs, both highly-reducing and non-reducing), non-ribosomal peptide synthetases, UbiA-type terpene cyclases (UTCs), polyketide synthase non-ribosomal peptide synthetase hybrids, and dimethyl allyl transferases (see FIG. 2).

[0117] Process 2000 also identifies the target sequence within genetic sequence data using homologous alignment scores (2005). Using an appropriate application, the sequence of the target is used to align to the genetic sequence data, looking for a threshold of homology. In some cases, a positive homologous event occurs when the target sequences aligns with the a portion of the genetic sequence having homology of at least about 50%, 60%, 70%, 80%, 90%, 95%, 97%, 98%, 99% or more than 99%. Sequence homology may be determined using any alignment tool, such as, for example BLAST.

[0118] Using the homologous alignment scores, candidate biosynthetic gene clusters may be identified in the region surrounding the homologous event (2007). In many cases, the proximal upstream and downstream genes are examined to determine and define a gene cluster. In some of these cases, 5, 6, 7, 8, 9, 10 or more proximal genes in either direction are examined. In addition or alternatively, a gene cluster may be defined by genetic distance of the homologous event. Gene clusters may also be defined using a bioinformatics tool, such as ClustScan, SMURF, CLUSEAN, and/or antiSMASH. Once identified and defined, clusters may be stored as data and/or reported via an output interface (2009).

[0119] An embodiment for ranking biosynthetic gene clusters using computer systems is provided in FIG. 1E. As shown, Process 3000 can begin with obtaining genet sequence data of multiple biosynthetic gene clusters. In this process, the clusters obtained each have a homolog protein of interest. The homolog of interest depends on the user's desired result. In many cases, the homolog of interest has a human ortholog that is known to be involved in a human condition, disorder, or disease. In some of these cases, the human ortholog is known to have mutations, either congenital or somatic, that lead to a condition, disorder, or disease. In some other of these cases, the human ortholog is involved in biological pathways that are involved in a condition, disorder, or disease. In other cases, the homolog of interest has an ortholog in an infectious species, including, but not limited to bacterial, fungal, protozoan species. In many of these cases, the ortholog in the infectious species is essential to the vitality of the organisms of the species. In some other of these cases, the ortholog in the infectious species is involved in producing a toxin. Furthermore, in many cases, the user has a desired result to prioritize clusters that will produce a secondary metabolite that may target the of human or infectious species ortholog.

[0120] Identifying a gene cluster that may produce a secondary metabolite that binds a target protein may involve multiple different steps. In some cases, such a gene cluster may be identified by the presence of one or more genes encoding a homolog of the target protein, within or adjacent to the cluster, as determined by a homology search (for example, using the tblastn algorithm, with a maximum score granted when one homolog is found). In some cases, a gene cluster may be identified by the confidence in homology of the target to a gene or genes in a cluster. For example, according to the tblastn algorithm, gene clusters containing a gene with an e value less than about 10⁻¹⁰, 10⁻²⁰, 10⁻³⁰, 10⁻³⁵ or 10⁻⁴⁰ may be selected. Gene clusters may also be selected using a protein blast method such as blastp to compare a predicted protein sequence against either known protein sequence or other predicted protein sequence. For blast searches using a known or predicted protein sequence gene clusters containing a gene with an e value less than about 10⁻¹⁰, 10⁻²⁰, 10⁻³⁰, 10⁻³⁵ or 10⁻⁴⁰ may be selected. Selected gene clusters may be prioritized with increasing priority scores for lower e-values. In some cases, a gene cluster may be identified by the fraction of the homologous gene that meets a certain threshold of identity (for example, with an increasing score for more identity, and a lower bound threshold of at least about 99%, 95%, 80%, 85%, 75%, 70%, 65%, 60%, 50%, 45%, 40%, 35%, 30%, 25%, 20% or 15% coverage). In some cases, a gene cluster may be selected if it contains a gene which produces a protein with at least about 20%, 30%, 40%, 50%, 60%, 70%, 80%, 90%, 95%, 97%, 98%, 99% or 100% homology to the target protein. In some cases, a protein that is encoded by the region that is included in, or positioned proximal to, a BGC may be identical to, or have at least about 30%, 40%, 50%, 60%, 70%, 80%, 90%, 95%, 99% or about 100% homology to a target protein. In some cases, a gene cluster may be identified by the total number of genes homologous to the target protein present in the entire genome of the organism (for example, with a maximum score granted to cases with 2-4 homologs per genome). In some cases, a gene cluster may be identified by the homology of the gene in, or adjacent to, the cluster to the target protein (for example, using the blastx algorithm, with a maximum score granted when the gene in the biosynthetic gene cluster's closest homolog in the target protein's genome is the target protein itself). In some cases, a gene cluster may be identified by the phylogenetic relationship of the target protein to the gene in the cluster (for example, with an increasing score for homologs in the gene cluster that clade with the target protein, with confidence assigned by a bootstrap test or Bayesian inference of phylogeny, and a lower bound threshold defined as homologs in a phylogenetic context that appear in a clade with bootstrap value of 0.7 or Bayesian posterior probability of 0.8). In some cases, a gene cluster may be identified by the expected number of homologs of the target in or adjacent to the biosynthetic cluster (for example, with a greater score the lower the probability of a homolog of the target being present in or adjacent to a biosynthetic cluster of a certain size, given the number of total homologs in the genome, as determined by a permutation test). In some cases, a gene cluster may be identified by the likelihood that the target protein is essential for viability, growth, or other cellular processes in the native environment (for example, through evidence that deletion of homologs in related organisms (such as S. cerevisiae) render the organism inviable). In some cases, a gene cluster may be identified by one or more of the above methods, or by any two or more of the above methods.

[0121] Utilizing identification steps, Process 3000 also scores each biosynthetic gene cluster based on factors indicative of secondary metabolite synthesis related to the homolog of interest (3003). Accordingly, a score is constructed for each biosynthetic cluster based on one or more of the following:

(a) the presence of one or more homologs of target orthologs within or adjacent to the cluster, as determined by a homology search (e.g., the BLAST algorithm);
(b) the degree of homology of one or more target orthologs to genes in a cluster (e.g., as defined by the e-value);
(c) the fraction of the homologous gene that meets a certain threshold (e.g., the number of homologous protein domains);
(d) the total number of genes homologous to the target ortholog present in the entire genome of the organism;
(e) the degree of homology of a gene in or adjacent to the cluster to the target ortholog
(f) the number of homologs in the gene family (e.g., the number of homologs of a human target gene in the human genome); and/or
(g) the expected number of homologs of the target ortholog in, or neighboring, a biosynthetic cluster (e.g., the probability of a homolog of the target being present in or adjacent to a biosynthetic cluster of a certain size, given the number of total homologs in the genome, and as determined from a permutation test)
(h) the synteny of the gene cluster with related species (e.g., conservation of gene cluster) (i) the function class of the target ortholog
(j) the presence of specific promoters adjacent to the homolog(s) within the gene cluster (e.g., identification of bidirection promoter upstream the homolog and biosynthetic gene)
(k) the presence of specific regulatory elements in the biosynthetic cluster (e.g., the number of transcription factor binding sites shared among target orthologs and homologs/biosynthetic genes in the cluster)
(l) the presence of homologs outside the cluster that are co-regulated with some or all the genes within the biosynthetic cluster
(m) the presence of protein- and DNA-sequence derived features within the clusters that have successfully been shown to produce secondary metabolites. It should be understood that a particular user may desire to use one, some, or all the factors listed here, and/or other factors not listed. The factors utilized depend on the user's application and desired result.

[0122] Process 3000 also has the option to calibrate the score to by referencing a set of “true positives” (i.e., cases where there is one or more known targets in or adjacent to a biosynthetic cluster that produces a small molecule targeting the target, such as the lovastatin BGC) (3005). The output of this process may be a ranked and/or scored list of biosynthetic clusters, which may be used to identify the clusters that will produce therapeutic small molecules targeting the products of a disease-related gene (3007). The ranked and/or scored list of clusters can be stored as data or reported via an output interface (3009).

[0123] Turning now to FIG. 1F, computer systems (4001) may be implemented on a single or multiple computing devices in accordance with some embodiments of the invention. Computer systems (4001) may be personal computers, laptop computers, and/or any other computing devices with sufficient processing power for the processes described herein. The computer systems (401) include a processor (403), which may refer to one or more devices within the computing devices that can be configured to perform computations via machine readable instructions stored within a memory (4007) of the computer systems (4001). The processor may include one or more microprocessors (CPUs), one or more graphics processing units (GPUs), and/or one or more digital signal processors (DSPs). According to other embodiments of the invention, the computer system may be implemented on multiple computers.

[0124] In a number of embodiments of the invention, the memory (4007) may contain a gene cluster identification and/scoring application (4009) that performs all or a portion of various methods according to different embodiments of the invention described throughout the present application. As an example, processor (4003) may perform a gene cluster identification and/or scoring method similar to any of the processes described above with reference to FIGS. 1D and 1E, during which memory (4007) may be used to store various intermediate processing data such as the genetic sequence alignment data (e.g., BLASTn) (4009a), identification of key target sequences with gene clusters (4009b), identification of homolog(s) to a protein of interest (4009c), characterization of homologs (4009d), scores and/or ranks of gene clusters (4009e), and calibration of gene cluster scores (4009f).

[0125] In some embodiments of the invention, computer systems (4001) may include an input/output interface (4005) that can be utilized to communicate with a variety of devices, including but not limited to other computing systems, a projector, and/or other display devices. As can be readily appreciated, a variety of software architectures can be utilized to implement a computer system as appropriate to the requirements of specific applications in accordance with various embodiments of the invention.

[0126] Although computer systems and processes for chimeric sequence unveiling and performing actions based thereon are described above with respect to FIG. 1F, any of a variety of devices and processes for data associated with cluster identification and/or scoring as appropriate to the requirements of a specific application can be utilized in accordance with many embodiments of the invention.

[0127] In some embodiments, gene sequences within a novel cluster, or a set of novel clusters, may be compared to gene sequences from known and characterized biosynthetic gene clusters. In some cases, phylogenetic comparisons may be carried out between gene sequences in a novel cluster and gene sequences from characterized gene clusters. As shown in FIG. 2, of the many biosynthetic enzymes which have been identified from sequence data, only a small fraction have been characterized, suggesting potential for many novel chemistries. Phylogenetic analysis may be performed on the core biosynthetic gene or genes, or on one or more tailoring genes of the novel cluster. Preferred clusters may be clusters containing one or more gene sequences which do not share a close phylogenetic relationship with a sequence from a characterized gene cluster. In some cases, gene clusters may be ordered according to their phylogenetic relationship to characterized gene clusters, clusters with the most distant relationships may be preferred for further analysis.

[0128] In several embodiments, a specific secondary metabolite is used as a weapon against another organism (i.e., is toxic to or inhibits the growth of specific type of organism). In many instances, the toxic secondary metabolite may also be toxic to the organism that produces the secondary metabolite. Accordingly, the producing organism may defend against self-harm in a number of ways including (but not limited to) pumping the secondary metabolite out of the cell, enzymatically negating the secondary metabolite, or producing an additional version of the protein targeted by the secondary metabolite that is less sensitive or insensitive to the secondary metabolite, (see FIG. 3). In instances in which an organism produces an additional version of the target protein, the “protective” version of the gene that encodes the additional version of the target protein that is less sensitive to the secondary metabolite is often colocalized with the biosynthetic gene cluster, for example the HMGR gene in the lovastatin cluster shown in FIG. 4. Although different to the gene that produces the target protein, the protective version of the gene should produce a protein that maintains detectable homology to the target protein. In several embodiments, the cluster identification process takes advantage of this homology to identify those biosynthetic gene clusters that contain or are adjacent to a gene that encodes a protective homolog of the target protein. In a number of embodiments of the disclosure, the genetic sequences of multiple organisms are analyzed to detect biosynthetic gene clusters possessing this characteristic.

[0129] A target protein may be any protein of interest which has a homolog in the genome sequence/s from which the gene clusters were obtained. In some cases, the target protein is an enzyme. In some cases, the target protein is a signaling protein. In some cases, the target protein is one which is required by the species of origin. For example, the target protein may be one which contributes to viability of growth of the cell, and deletion or inactivation of the target protein from the cell may have deleterious effects on the viability or growth of the cell. In some cases, the target protein may have a vertebrate or mammalian homolog. In some cases, the target protein has a human homolog. The human homolog may be a protein which is dysregulated in a disease. An example of a gene cluster which was identified using methods disclosed herein, and which comprises a homolog of the BRSK1 gene is shown in FIG. 15A.

[0130] In some embodiments, a biosynthetic cluster of interest which produces a secondary metabolite that interacts with a target protein may also produce a protein for inactivating the secondary metabolite or for secreting the secondary metabolite from the cell in which it is produced. A protein which inactivates the secondary metabolite may be omitted when designing an expression construct to express this cluster in a host cell. A protein involved in secreting the secondary may be included or omitted when designing an expression construct to express this cluster in a host cell. To identify such clusters several approaches may be used. For example a set of biosynthetic gene clusters may be identified from genome data and the identified clusters may be analyzed for the presence of enzymes with activities that may be useful for degradation of a secondary metabolite. In another example, a set of biosynthetic gene clusters may be analyzed for the presence of proteins involved in transport or secretion pathways. In another example a homology search may be identified across one or more genome sequences to find genes encoding proteins homologous to an enzyme known to degrade a toxic compound. Once such genes have been identified they may be analyzed for proximity to a biosynthetic gene cluster. Proximity to a gene cluster may be defined as within about 50 kb, 40 kb, 30 kb, 20 kb, 10 kb, 5 kb, 1 kb, or less than 1 kb.

[0131] In some embodiments, a gene cluster which produces a secondary metabolite that may be toxic to the host cell may also contain signals to direct the production of the secondary metabolite to a specific cellular location. In some cases, the enzymes may be membrane tethered to the intracellular or extracellular side of a cell membrane, or may be secreted through a membrane to the intracellular or extracellular side (including the insides of organelles and vacuoles). For example, the enzymes of the cluster may contain membrane-targeting signals to target the enzymes to either the extracellular membrane or to an intracellular organelle or vacuole. In some cases, the enzymes may be targeted to the extracellular membrane in an orientation which results in the active region of the enzyme being inside of an organelle or vacuole. In some cases, the enzymes may be targeted to the extracellular membrane in an orientation which results in the active region of the enzyme being outside of the cell. Such clusters may be identified by analyzing the predicted proteins of the cluster for the presence of peptide targeting signals or of terminal sequences with homology to targeting signals.

[0132] In some cases, a genome or genomes may be searched for gene clusters and the set of identified gene clusters may be searched for genes which are homologous to a target gene, or which produce proteins homologous to a target protein. In other cases, a genome or genomes may be searched for a gene or genes homologous to a target gene, and the identified genes may be analyzed for association with a gene cluster. In other cases, a genome or genomes may be searched for gene clusters and the set of identified gene clusters may be phylogenetically analyzed to determine relationships between the identified gene clusters and known, characterized, gene clusters. In yet other cases, a novel genome or genomes may be searched for sequences distantly homologous to a known biosynthetic enzyme, and the identified genes may be analyzed for association with a gene cluster.

[0133] Specific secondary metabolites synthesized using methods in accordance with a number of embodiments of the disclosure and the proteins utilized to identify the biosynthetic gene clusters used to synthesize the secondary metabolites and targeted by the secondary metabolites are described herein. An example of a method which may be used to produce a secondary metabolite is shown in FIG. 5. As shown in an exemplified embodiment process in FIG. 5A, Process 100 generates and extracts a heterologous compound for use. Exemplary Process 100 can begin by searching genetic data of various organismal species for pathways or BGCs that produce a compound product (101). The organismal species used in this step can be any species. For example, fungal and bacterial species often contain multiple BGC pathways that are encoded in its DNA. Likewise, the genetic data to be searched can be any genetic data available or determinable by the user. Accordingly, on one end of the spectrum, the genetic data may be a fully annotated, publicly available genome of a well-studied species (e.g., Penicillium notatum). On the other end of the spectrum, the genetic data may be a publicly unavailable, partial genomic sequence of a newly discovered species incapable of anthropogenic cultivation, wherein the partial sequence is found to have a gene cluster that may produce a compound.

[0134] Exemplary embodiment Process 100 may continue by using the genetic data to reconstruct the compound product pathway in an acceptable genetic expression system (103). Often, to reconstruct the compound pathway, the genetic data is used to create nucleic acid molecules (e.g., DNA) comprising the coding sequences of the pathway genes sufficient to produce the product in the acceptable genetic expression system. The nucleic sequences are to be transferred into the expression system. Expression systems are any organism capable of producing the heterologous compound by heterologous expression of the pathway genes. Typical expression systems include (but are not limited to) E. coli and S. cerevisiae.

[0135] Once the compound product pathway is reconstructed and transferred within an expression system, the expression system produces the compound (105) in exemplary Process 100. Typically, production of the compound results from coordinated expression of the pathway genes in the expression system. The coordinated expression of the pathway genes results in the production of the enzymes primarily responsible for constructing the heterologous compound product.

[0136] FIG. 5B depicts another exemplary embodiment process. Exemplary Process 200 produces, extracts, and characterizes a biosynthetic compound derived from heterologous expression of a gene cluster. The process may begin with the identification and selection of a gene cluster with an identifiable trait that is indicative of compound production (201). Several indicative processes to select gene clusters exist, including several computer-implemented programs. One such program is antiSMASH2.0, which is platform for mining BGC clusters for production of secondary metabolites that searches for core structures to identify putative BGCs (K. Blin, et al. Nucleic Acids Res. 41:W204-12, 2013, the disclosure of which is incorporated herein by reference in its entirety). Another such method is described herein which utilizes homolog sequences within a proximal region in the genome to identify putative BGCs. It should be noted that many other methodologies could be used to select BGCs.

[0137] Once a gene cluster has been selected, Process 200 continues by appropriating nucleic acid molecules with the coding sequences of the various genes within the cluster (203 in FIG. 5B). Typically, the nucleic molecules are DNA, but other nucleic molecules (e.g., RNA) can be used for certain applications. When extracting gene sequence data from the host organism, it is usual to remove the non-translated portions (e.g., UTRs, introns) from the gene, leaving only the coding sequence, but the non-translated portions may also be used, especially if they provide a beneficial characteristic. Appropriation of the nucleic molecules can be performed by many different methods including (but not limited to) direct extraction from the host, chemical synthesis, and/or cDNA generation methods (e.g., reverse transcription of host RNA). Regardless of the method used, the resulting nucleic acid molecules may be available to build into expression vectors for heterologous expression.

[0138] Exemplary Process 200 utilizes the appropriated nucleic acid molecules to assemble expression vectors for expression in an appropriate organismal expression system (e.g., E. coli, S. cerevisiae). Expression vectors are nucleic acid molecules that have the necessary components to express a heterologous gene in the expression system. Common expression vectors are plasmid DNA and viral vectors, but also include kits of DNA molecules that can be joined together to form a longer DNA molecule by a recombination methodology (e.g., yeast homologous recombination (YHR)).

[0139] To express a heterologous gene from an expression vector, an expression cassette is may be used, which comprises the sequences of an appropriate promoter and an appropriate terminator along with the heterologous gene sequence. The promoter is typically located upstream of the heterologous gene and can regulate the gene's expression. Many different types of promoters can be used. The selection of the appropriate promoter depends on the application and expression profile desired. For example, in the S. cerevisiae expression system, production-phase promoters may express heterologous genes only in the production-phase of the yeast culture's life cycle, which may have desirable properties. For more description of production-phase promoters, please refer to the related U.S. patent application Ser. No. 15/469,452 (“Inducible Production-Phase Promoters For Coordinated Heterologous Expression in Yeast”), the disclosure of which is incorporated herein by reference in its entirety. However, it should be understood, that constitutive promoters and other response-driven promoters could be used within the system.

[0140] The sequences of promoters to be used in an expression vector can be derived from various sources. E. coli expression systems often use the T7 promoter derived from the T7 bacteriophage because the promoter reliably produces high expression in E. coli. Endogenous promoter sequences (e.g., the lac operon in E. coli) are expected to perform well within the organismal expression system.

[0141] Expression vectors often have other sequences that benefit duplication, selection and stability of the vector within the organismal expression system, in addition to the expression cassette. In several instances, some of these sequences are necessary for maintenance in the expression system. For example, plasmid vectors within an E. coli or S. cerevisiae host require a host origin of replication and a selectable marker. The origin of replication signals the host expression system to replicate the plasmid vector in order to produce more copies of the plasmid as the host cells duplicate and divide. The selectable marker ensures that only the host cells that contain the vector continue to survive and propagate. Accordingly, these sequences may be necessary for viable heterologous expression.

[0142] Once the expression vector is assembled, the heterologous BGC genes are expressed using the organismal expression system (207). Accordingly, the expression vector is to exist within the organismal host such that the host will express the heterologous BGC genes to produce the encoded enzymes. The enzymes produce a biosynthetic compound. This compound is be extracted from the expression system (209).

[0143] Extracted heterologous biosynthetic compounds can be characterized to determine their various structures and conformations. Some resultant products may have a solitary structure and conformation while other products will have several different structures with multiple conformations. The various structures and conformations can be determined using mass spectrometry, chromatography, and/or other methods.

[0144] There are numerous classes of biosynthetic compounds. For example, polyketides and terpenes are a class of compounds derived from various organismal species. Many novel biosynthetic compounds are likely to have beneficial properties, as a multitude of biosynthetic compounds have been found to be useful in several industries.

[0145] Illustrated in FIG. 5C is an exemplary pipeline to produce heterologous, biosynthetic compounds. Exemplary Pipeline 300 takes advantage of a yeast expression system to reproduce a fungal BGC in order to produce a heterologous compound product.

[0146] Pipeline 300 begins with selection of a biosynthetic gene cluster (301). Depicted, as an example, is a phylogenetic tree of numerous fungal BGCs. Using the phylogenetic data, a BGC having a desired trait is selected. The coding sequences of the various BGC genes are then used to chemically synthesize DNA molecules (303). The synthetized BGC DNA molecules are then to be assembled into a heterologous expression construct (305). In this example, the DNA molecules are assembled by yeast homologous recombination. Accordingly, the synthesized DNA molecules have overlapping homologous sequences that the yeast will use to recombine the various DNA molecules into a plasmid DNA vector.

[0147] Pipeline 300 then utilizes the assembled expression vectors to maintain and express the BGC in the yeast (307). The expression of the various heterologous genes results in expression of a number of heterologous enzymes that then can produce the heterologous biosynthetic compounds. Once a sufficient titer of compound is produced, it can be characterized to determine its structures and properties (309).

[0148] Briefly, the method comprises gene cluster selection as discussed herein, synthesis of coding sequence, promoters and terminators, assembly of the cluster coding sequence, expression in a fungal host, and isolation and characterization of compounds produced. An example of a gene cluster identified using the methods herein, and the compound created by expression of the identified genes in yeast, is shown in FIG. 15B.

### Cluster Engineering

[0149] Once a gene cluster is identified according to the methods described herein, the cluster may be prepared for expression in a heterologous host cell. Editing of a putative gene cluster may involve steps such as: removal of introns, replacement of promoters, replacement of terminators, gene shuffling, and codon optimization. For example, if a gene cluster is to be expressed in S. cerevisiae then coding sequences from the gene cluster may be codon optimized for S. cerevisiae, and operably linked to S. cerevisiae promoters and terminators.

[0150] The gene cluster editing may rely on automatic annotation of expressed sequences, introns, and exons, or on manual inspection of the cluster. The gene cluster editing may be done in silico using the sequence data, or may be done in vitro or in vivo using the DNA sequence in a suitable vector such as a cloning vector. In some cases an initial edited gene cluster may not produce a product and reanalysis of the predicted coding sequences, and introns of the same, may reveal errors in the predicted transcription start sites, transcription termination sites and/or splice sites.

[0151] In an embodiment, this disclosure provides sequences (SEQ ID NOs: 67-483) of cryptic BGCs which encode various products. These BGCs may also be reengineered to provide the coding sequences without the endogenous regulatory sequences. The coding sequences from these clusters may be isolated and cloned into one or more expression vectors for expression in a model host system. The expression vectors may be plasmids, viruses, linear DNA, bacterial artificial chromosomes or yeast artificial chromosomes. The expression vectors may be designed to integrate into the host genome, or to not integrate. In some cases, the expression vector may be a high copy number plasmid.

### Promoters

[0152] Expression of a refactored gene cluster in a host organism may require coordinated expression of several different coding sequences. In some cases, the expression of multiple different coding sequences in a host organism may require the use of multiple different promoters suitable for that organism. This disclosure provides methods for discovering multiple promoters with similar activities and expression patterns but with differing DNA sequence. Such methods may involve use of closely related species, such as different species of Saccharomyces. Saccharomyces (S.) is a genus of fungi composed of different yeast species. The genus can be divided into two further subgenera: S. sensu stricto and S. sensu lato. The former have relatively similar characteristics, including the ability to interbreed, exhibiting uniform karyotype of sixteen chromosomes, and their use in the fermentation industry. The later are more diverse and heterogeneous. Of particular importance is the S. cerevisiae species within the S. sensu stricto subgenus, which is a popular model organism used for genetic research.

[0153] The yeast S. cerevisiae is a powerful host for the heterologous expression of biosynthetic systems, including production of biofuels, commodity chemicals, and small molecule drugs. The yeast's genetic tractability, ease of culture at both small and large scale, and a suite of well-characterized genetic tools make it a desirable system for heterologous expression. Occasionally, production systems require coordinated expression of two or more heterologous genes. Coordinated expression systems in bacteria (e.g., E. coli) has long exploited the operon structure of bacterial gene clusters (e.g., lac operon), allowing a single promoter to control the expression of multiple genes.

[0154] The construction of synthetic operons therefore allows a single inducible promoter to control the timing and strength of expression of an entire synthetic system. In yeast, many heterologous-expression systems do not rely on the operon system, but instead rely on a one-promoter, one-gene paradigm. Accordingly, multi-gene heterologous expression is generally performed using multiple expression cassettes with a well-characterized promoter and terminator, each on a single expression vector (e.g., plasmid DNA) (See D. Mumberg, R. Muller, and M. Funk Gene 156:119-22, 1995). With traditional restriction-ligation cloning, it is also possible to recycle a promoter on a single plasmid by the serial cloning of multiple genes (M. C. Tang, et al., J Am Chem Soc 137:13724-27, 1995).

[0155] Turning now to the drawings and data, disclosed embodiments are generally directed to systems and constructs of heterologous expression during the production phase of yeast. In many of these embodiments, the expression system involves coordinated expression of multiple heterologous genes. More embodiments are directed to production-phase promoter systems having promoters that are inducible upon an event in the yeast's growth or by the nutrients and supplements provided to the yeast. Specifically, a number of embodiments are directed to the promoters that are capable of being repressed in the presence of glucose and/or dextrose. In more embodiments, the promoters are capable of being induced in the presence of glycerol and/or ethanol. In additional embodiments, at least one production-phase promoter exists within an exogenous DNA vector, such as (but not limited to), for example, a shuttle vector, cloning vector, and/or expression vector. Embodiments are also directed to the use of expression vectors for the expression of heterologous genes in a yeast expression system.

[0156] Controlled gene expression is desirable in heterologous expression systems. For example, it would be desirable to express heterologous genes for production during a longer stable phase. Accordingly, decoupling the anaerobic growth and aerobic production phases of a culture allows the yeast to grow to high density prior to introducing the metabolic stress of expressing unnaturally high amounts of heterologous protein. In accordance with many embodiments, the anaerobic growth phase is defined by the yeast culture's energy metabolism in which the yeast cells predominantly catabolize fermentable carbon sources (e.g., glucose and/or dextrose), and a high growth rate (i.e., short doubling-time). In contrast, and in accordance with several embodiments, the aerobic production phase is defined by the yeast culture's energy metabolism in which the yeast cells predominantly catabolize nonfermentable carbon sources (e.g., ethanol and/or glycerol), and a steady growth rate (i.e., long doubling-time). Accordingly, each yeast cell's energy metabolism can be predominantly in aerobic or nonaerobic phase, and dependent on the local concentration of the carbon source.

[0157] FIG. 6A depicts the phases of a yeast culture when provided a fermentable sugar, such as glucose or dextrose sugar, at a concentration of around 2-4% as its main carbon source. Initially, a yeast culture will predominantly catabolize the fermentable sugar, which correlates with an exponential growth with very high doubling rates. The growth phase typically lasts approximately 4-10 hours. During this phase, the catabolism of the fermentable sources results in the production of ethanol and glycerol.

[0158] Once glucose becomes scarce, the growth of a yeast culture passes a diauxic shift and begins to predominantly catabolize nonfermentable carbon sources (e.g., ethanol and/or glycerol) (FIG. 6B). The predominant catabolism of nonfermentable carbon source correlates with a longer and more stable production phase that can last for several days, or even weeks in an industrial-like setting (FIG. 6A). During the production phase, yeast cultures reach and maintain a high concentration, but have a much lower doubling time (FIG. 6A). Due to the decrease in doubling rate, yeast cultures no longer expend a great amount of energy and resources on rapid growth and thus can reallocate that energy and those resources to other biological activities, including heterologous expression. Accordingly, it is hypothesized that limiting the transcription of heterologous genes to the production phase would allow a yeast culture to reach a high, healthy confluency that would in turn allow better heterologous protein expression and biosynthetic production.

[0159] In yeast, transcriptional regulation can be achieved in several ways, including inducement by chemical substrates (e.g., copper or methionine), the tetON/OFF system, and promoters engineered to bind unnatural hybrid transcription factors. Perhaps the most commonly employed inducible promoters are the promoters controlled by the endogenous GAL4 transcription factor. GAL4 promoters are strongly repressed in glucose, and upon switching to galactose as a carbon source, strong induction of transcription is observed (M. Johnston and R. W. Davis, Mol. Cell Biol. 4:1440-48, 1984). While this system leads to high-level transcription, only four galactose-responsive promoters are known, and galactose is both a more expensive and a less efficient carbon source as compared to glucose (S. Ostergaard, et al., Biotechnol. Bioeng. 68:252-59, 2000). Other carbon-source dependent promoters have also been used for heterologous gene expression. The S. cerevisiae ADH2 gene exhibits significant derepression upon depletion of glucose as well as strong induction by either glycerol or ethanol (K. M. Lee & N. A. DeSilva Yeast. 22:431-40, 2005). Once induced, genes driven by the ADH2 promoter (pADH2) display expression levels equivalent to those driven by highly expressed constitutive counterparts. This induction profile was found to work in heterologous expression studies, as the system auto-induces upon glucose depletion in the late stages of fermentative growth after cells have undergone diauxic shift. The ADH2 promoter has been used extensively for yeast heterologous expression studies, resulting in high-level expression of several heterologous biosynthetic proteins (For example, see C. D. Reeves, et al., Appl. Environ. Microbiol. 74:5121-29, 2008).

[0160] As shown in FIG. 6C, the concentration of ethanol and glycerol increases as glucose and dextrose sugar decreases, due to anaerobic glycolysis (i.e., breaking down the fermentable sugar) and subsequent fermentation (i.e., converting the broken-down glucose into alcohol) and glycerol biosynthesis (i.e., converting the broken-down glucose into glycerol). Upon fermentable sugar depletion, yeast cultures undergo a diauxic shift and begin to use ethanol and glycerol as a carbon source instead of glucose. A diauxic shift, as understood in the art, is defined as a point in time when an organism switches from primarily consumption of one source for energy, to primarily another source. This shift typically elicits significant changes to a yeast culture's gene-expression pattern. Accordingly, it is hypothesized that higher concentrations of ethanol, (e.g., ˜2-4%) and or glycerol (e.g., ˜2%) could be used to stimulate promoters that either directly or indirectly respond to these concentrations (See FIGS. 6A and 6C).

[0161] Various disclosed embodiments are based on the discovery of inducible promoters that can be used for the coordinated expression of multiple genes (e.g., gene cluster pathway) in Saccharomyces yeast. Described below are sets of inducible promoters from S. cerevisiae and related species that are inactive during anaerobic growth, activating transcription only after a diauxic shift when glucose is near-depleted and the yeast cells are respiring (i.e., the production phase). As portrayed in various embodiments, various production-phase promoters are auto-inducing and allow automatic decoupling of the growth and production phases of a culture and thus initiate heterologous expression without the need for exogenous inducers. It should be noted, however, that many embodiments include production-phase promoters that are also inducible in the presence of nonfermentable carbon-sources (e.g., ethanol and/or glycerol) supplied to the yeast. As such, multiple embodiments employ recombinant production-phase promoters that act much like constitutive promoters when the host yeast cultures are constantly maintained in ethanol and/or glycerol-containing media.

[0162] Once activated, the strength of various production-phase promoters can vary as much as 50-fold. The strongest production-phase promoters stimulate heterologous expression greater than that observed from strong constitutive promoters. The production-phase promoters could be employed in many different applications in which high expression of multiple genes is beneficial. Accordingly, the promoters can be used, for example, in multiple subunit protein production or for the production of biosynthetic compounds that are produced by multiple proteins within a pathway. Discussed in an exemplary embodiment below, some embodiments are used to express multiple proteins involved in production of indole diterpene compound product. When compared to constitutive promoters, the production-phase promoters produced greater than a 2-fold increase in titer of the exemplary diterpene compounds. In other exemplary embodiments, it was found that the production-phase promoter system outperformed constitutive promoters by over 80-fold. Thus, these promoters can enable heterologous expression of biosynthetic systems in yeast.

[0163] The practice of several embodiments will employ, unless otherwise indicated, conventional methods of chemistry, biochemistry, and molecular biology and recombinant DNA techniques within the skill of the art. Such techniques are explained fully in the literature. See, e.g., A. L. Lehninger, Biochemistry (Worth Publishers, Inc., 30 current addition); Sambrook, et al., Molecular Cloning: A Laboratory Manual (3rd Edition, 2001); Methods In Enzymology (S. Colowick and N. Kaplan eds., Academic Press, Inc.).

### Inducible Production-Phase Promoters for Heterologous Expression in Yeast

[0164] In accordance with several embodiments, inducible production-phase promoters can be constructed into exogenous expression vectors for production of at least one protein in Saccharomyces yeast. In many embodiments, the constructed expression vectors have multiple inducible production-phase promoters in order to express multiple heterologous genes. Several embodiments are directed to production-phase promoters and DNA vectors incorporating these promoters. Promoters, in general, are defined as a noncoding portion of DNA sequence situated proximately upstream of a gene to regulate and promote its expression. Typically, in S. cerevisiae and similar species, the promoter of a gene can be found within 500-bp upstream of a gene's translation start codon. In some cases, a promoter may be about 500 bp, 600 bp, 700 bp, 800 bp, 900 bp, 1 kb, 1.5 kb, 2 kb or more than 2 kb upstream of a gene's transcription start site.

[0165] In accordance with several embodiments, production-phase promoters have two defining characteristics. First, production-phase promoters are capable of repressing heterologous expression of a gene in S. cerevisiae and similar species when the yeast is exhibiting anaerobic energy metabolism. As described previously, yeast exhibit anaerobic metabolism in the presence of a nontrivial concentration of fermentable carbon sources such as, for example, glucose or dextrose. In addition, production-phase promoters are also capable of inducing heterologous expression of a gene in S. cerevisiae and similar species when the yeast is exhibiting aerobic energy metabolism. As described previously, yeast exhibit aerobic metabolism when fermentable carbon sources are near depleted and the yeast cells switch to a catabolism of nonfermentable carbon sources such as glycerol or ethanol. These characteristics correspond to the phase charts in FIGS. 6A-6C. Tables 1 and 2 provide several examples of production-phase promoters in accordance with several embodiments.

[0166] The production-phase promoters can be characterized based on their level of transgene expression relative to each other and to constitutive promoters. As described in an exemplary embodiment below, it was found that the sequence of endogenous promoters of the S. cerevisiae genes ADH2, PCK1, MLS1, and ICL1 exhibited high-level expression and thus can be characterized as strong production-phase promoters (Table 1). Sequences of the endogenous promoters of the S. cerevisiae genes YLR307C-A, ORF-YGR067C IDP2, ADY2, CACI, ECM13, and FAT3 exhibited mid-level expression and thus can be characterized as semi-strong production phase promoters (Table 1). In addition, sequences of the endogenous promoters of the S. cerevisiae genes PUT1, NQM1, SFC1, JEN1, SIP18, ATO2, YIG1, and FBP1 exhibited low-level expression and thus can be characterized as weak production-phase promoters (Table 1).

TABLE 1
Production-Phase Promoters Expression Phenotype

| | | | Sequence |
|---|---|---|---|
| Gene Name | Systematic Name | Expression Phenotype | ID Number |
| ADH2 | YMR303C | Strong | 1 |
| PCK1 | YKR097W | Strong | 2 |
| MLS1 | YNL117W | Strong | 3 |
| ICL1 | YER065C | Strong | 4 |
| YLR307C-A | YLR307C-A | Semi-Strong | 5 |
| YGR067C | YGR067C | Semi-Strong | 6 |
| IDP2 | YLR174W | Semi-Strong | 7 |
| ADY2 | YCR010C | Semi-Strong | 8 |
| GAC1 | YOR178C | Semi-Strong | 9 |
| ECM13 | YBL043W | Semi-Strong | 10 |
| FAT3 | YKL187C | Semi-Strong | 11 |
| PUT1 | YLR142W | Weak | 12 |
| NQM1 | YGRO43C | Weak | 13 |
| SFC1 | YJR095W | Weak | 14 |
| JEN1 | YKL217W | Weak | 15 |
| SIP18 | YMR175W | Weak | 16 |
| ATO2 | YNR002C | Weak | 17 |
| YIG1 | YPL201C | Weak | 18 |
| FBP1 | YLR377C | Weak | 19 |

[0167] The closely related S. sensu stricto species have similar genetics and growth characteristics. Accordingly, the phase charts provided in FIGS. 6A-6C apply generally to S. sensu stricto species. Table 2 provides a list of strong production-phase exogenous promoters of similarly related species in accordance with numerous embodiments of the disclosure.

TABLE 2
Strong Production-Phase Promoters of S. sensu stricto species

| Species | Gene Name | Sequence ID Number |
|---|---|---|
| S. paradoxus | ADH2 | 36 |
| S. kudriavzevii | ADH2 | 37 |
| S. bayanus | ADH2 | 38 |
| S. paradoxus | PCK1 | 41 |
| S. kudriavzevii | PCK1 | 42 |
| S. bayanus | PCK1 | 43 |
| S. paradoxus | MLS1 | 44 |
| S. kudriavzevii | MLS1 | 45 |
| S. bayanus | MLS1 | 46 |
| S. paradoxus | ICL1 | 47 |
| S. kudriavzevii | ICL1 | 48 |
| S. bayanus | ICL1 | 49 |

[0168] It should be noted that substantially similar sequences to the production-promoter sequences are expected to regulate heterologous expression in S. cerevisiae and achieve similar results. Accordingly, a substantially similar sequence of a production-phase promoter, in accordance with numerous embodiments, is any sequence with a high functional equivalence such that when regulating heterologous expression in S. cerevisiae that it achieves substantially similar results. For example, in an exemplary embodiment below, it was found that the ADH2 promoter of S. bayanus is only 61% homologous, yet achieved strong heterologous expression in S. cerevisiae, similar to the endogenous ADH2 promoter. In some cases, a substantially similar sequence may be homologous to the promoter sequences identified herein (e.g., have a nucleotide BLAST e value of less than or equal to 10⁻¹⁰, 10⁻²⁰, 10⁻³⁰, 10⁻³⁵ or 10⁻⁴⁰).

[0169] In FIG. 7A, an exemplary schematic of a section of an exogenous DNA vector (e.g., cloning vector, expression vector, and/or shuttle vector) having a production-phase promoter sequence embedded within. A vector is capable of transferring nucleic acid sequences to target cells (e.g., yeast). Typical DNA vectors include, but are not limited to, plasmid or viral constructs. DNA vectors are also meant to include a kit of various linear DNA fragments that are to be recombined to form a plasmid or other functional construct, as is common in yeast homologous recombination methods (See e.g., Z. Shao, H. Zhao & H. Zhao, 2009, Nucleic Acids Research 37:e16, 2009, the disclosure of which is incorporated herein by reference). Often, embodiments of cloning vectors will incorporate other sequences in addition to the production-phase promoter. As depicted in FIG. 7A, the exemplary cloning vector has a terminator sequence and cloning/recombination sequence in addition to the production-phase promoter, each of which can assist with expression vector construction. Furthermore, other sequences necessary for growth and amplification can be incorporated into the promoter vector. Embodiments of these sequences may include, for example, at least one appropriate origin of replication, at least one selectable marker, and/or at least one auxotrophic marker. It should be noted, however, that various embodiments of the disclosure are not required to contain cloning, terminator, or either sequences. For example, embodiments of a typical shuttle vector may only contain the production-phase promoter sequence along with the necessary sequences for amplification in a biological system.

[0170] For purposes of this application, an exogenous DNA vector is any DNA vector that was constructed, at least in part, exogenously. Accordingly, DNA vectors that are assembled using the yeast's own cell machinery (e.g., yeast homologous recombination) would still be considered exogenous if any of the DNA molecules transduced within yeast for recombination contain exogenous sequence or were produced by a non-host methodology, such as, for example, chemical synthesis, PCR amplification, or bacterial amplification.

[0171] As shown in FIG. 7B, various embodiments of the disclosure are directed to DNA vectors having multiple production-phase promoters. In these various embodiments, multiple different production-phase promoters are incorporated, preferably each having a unique sequence and derived from a different gene and/or S. sensu stricto species. Having unique promoter sequences can prevent complications that can arise during product production in yeast, such as, for example, unwanted DNA recombination at sites similar to the promoter sequences that render the DNA vector constructs undesirable. In many embodiments, the DNA vector has at least 2, 3, 4, 5, 6, 7, 8, 9, 10, 11, 12, 13, 14, 15, 16, 17, 18, 19, 20 or more than 20 production-phase promoters. As the size of the DNA vector increases, the utility may decrease, as larger vectors may become unwieldly for the intended organism to handle. For example, plasmids for amplification in E. coli are often somewhere between 2,000 and 10,000 base pairs (bp) but can handle up to 20,000 bp or so. Likewise, plasmids for amplification and growth in yeast can vary from approximately 10,000 to 30,000 bp. Viral vectors, on the other hand, often have a limited construct size and thus may require a more precise vector size. Thus, depending on vector and intended use, the number of production-phase promoters within a DNA vector will vary.

[0172] Although FIG. 7B depicts recombination sites, cloning sites, and terminator sequences, it should be noted that these sequences may or may not be included in various embodiments of DNA vectors having multiple production-phase promoters. The incorporation of these sequences or other various sequences is often dependent on the purpose of the DNA vector. For example, cloning vectors may not include a terminator sequence if that sequence is to be incorporated into an expression construct at another stage of assembly.

[0173] FIG. 8A depicts an exemplary heterologous expression vector having a production-phase promoter for expression in yeast, in accordance with various embodiments of the disclosure. Expression constructs contain an expression cassette that has a promoter, a heterologous gene, and a terminator sequence in order to produce an RNA molecule in an appropriate host. Expression cassette in accordance with numerous embodiments will have a production-phase promoter situated proximately upstream of a heterologous gene of which the promoter is to regulate expression. It should be understood, that the precise location of the production-phase promoter upstream of the heterologous gene may vary, but the promoter generally is within a certain proximity to adequately function.

[0174] In many embodiments of the disclosure, a heterologous gene is any gene driven by a production-phase promoter, wherein the heterologous gene is different than the endogenous gene that the promoter regulates within its endogenous genome. Accordingly, a S. cerevisiae production-phase promoter could regulate another S. cerevisiae gene provided that the gene to be regulated is not the gene endogenously regulated. For example, the S. cerevisiae ADH2 promoter should not regulate the S. cerevisiae ADH2 gene; however, the S. cerevisiae ADH2 promoter can regulate any other S. cerevisiae gene or the ADH2 gene from any other species. Often, in accordance with many embodiments, the heterologous gene is from a different species than the species from which the production-promoter sequence was obtained.

[0175] Although not depicted, various embodiments of expression cassettes may include other sequences, such as, for example, intron sequences, Kozak-like sequences, and/or protein tag sequences (e.g., 6×-His) that may or may not improve expression, production, and/or purification. In yeast, various embodiments of expression vectors will also minimally have a yeast origin of replication (e.g., 2-micron) and an auxotrophic marker (e.g., URA3) in addition to the expression cassette. Other nonessential sequences may also be included, such as, for example, bacterial origins of replication and/or bacterial selection markers that would render the expression capable of amplification in a bacterial host in addition to a yeast host. Accordingly, various embodiments of expression vectors would include the essential sequences for heterologous expression in yeast and other various embodiments would include additional nonessential sequences.

[0176] In accordance with various embodiments, a DNA vector having a production-phase promoter expression cassette can be transformed into a yeast cell. Or alternatively, and in accordance with numerous embodiments, a DNA vector having a production-phase promoter expression cassette can be assembled within yeast using homologous recombination techniques. Once existing within a yeast cell, the production-phase promoter can regulate the expression of a heterologous gene in accordance with the yeast cell's energy metabolism. As described previously, and in accordance with many embodiments, production-phase promoters repress heterologous expression when the yeast cell is in an anaerobic energy metabolic state. Alternatively, and in accordance with a number of embodiments, production-phase promoters induce heterologous expression when the yeast cell is in an aerobic energy metabolic state

[0177] Depicted in FIG. 8B are alternative exemplary heterologous expression vectors having multiple production-phase promoters for expression of multiple genes in yeast in accordance with numerous embodiments. In some embodiments, the expression vectors will include at least two expression cassettes, each with a unique promoter, gene, and terminator sequence in order to prevent unwanted recombination. The number of expression cassettes will vary based on vector construct design and application. For heterologous expression in S. cerevisiae, it has been found that plasmid expression vectors of approximately 30,000 bp are still tolerated. Thus, vectors containing up to seven production-phase promoter expression cassettes can be incorporated into an expression vector and have been found to be able to maintain adequate gene expression and protein production. Larger vectors with more expression cassettes may be tolerated.

[0178] Although FIG. 8B depicts multiple expression cassettes sequentially in the same orientation (5′ to 3′), it should be understood that the combination of two or more expression cassettes is not limited to sequential linear organization in the same orientation. Expression cassettes in accordance with many embodiments exist within the expression vector in any orientation and in any sequential order. Furthermore, it should be understood that other sequence elements of an expression vector (e.g., an auxotrophic marker) may be among and/or between the multiple expression cassettes. Optimal vector design is likely to depend on various factors, such as, for example, optimizing the location of the auxotrophic marker to enable the final expression vector to include each expression cassette to be incorporated.

[0179] DNA heterologous expression vectors are a class of DNA vectors, and thus the description of general DNA vectors above also applies to the expression vectors. Accordingly, many embodiments of the expression vectors are formulated into a plasmid vector, a viral vector, a circular vector, or a kit of linear DNA fragments to be recombined into a plasmid by yeast homologous recombination. In several of these embodiments, the end-product vector contains at least one expression cassette having a production-phase promoter. It should be understood, that in addition to the at least one production-phase promoter, some vector embodiments incorporate expression cassettes that include other promoters, such as (but not limited to), constitutive promoters that maintain high expression during the growth and production phases.

[0180] The various embodiments of heterologous expression vectors having at least one production-phase promoter can be used in numerous applications. For example, high expression in the production phase can lead to better, prolonged expression, as compared to constitutive promoters. In many applications, the end product is a protein from a single gene or a protein complex of multiple genes to be purified from the culture. For these applications, high, prolonged expression using production-phase promoters can lead to better yields of proteins. Furthermore, when the heterologous protein is toxic to the host yeast cells, the use of production-phase promoters prevents the expression of the toxic protein during growth phase, allowing the yeast to reach a healthy confluency before mass protein production.

[0181] The production-phase promoter vectors can also benefit the production of a biosynthetic compound from a gene cluster. Many products derived from various natural species are produced from a cluster of genes with sequential enzymatic activity. For example, the antibiotic emindole SB is produced from a cluster of four genes that is expressed in Aspergillus tubingensis. To reproduce this gene cluster in a yeast production model, a production-promoter vector system with four different expression cassettes could work. This system would allow the yeast to reach a healthy confluency before the energy-draining expression of four heterologous proteins begins, leading to better overall yields of the antibiotic product. In fact, experimental results provided in an exemplary embodiment described in Example 1 below demonstrate that a production-phase promoter vector outperformed a constitutive promoter vector approximately 2-fold to produce the emindole SB product.

[0182] FIG. 9 depicts an exemplary process (Process 400) to implement various embodiments of production-phase promoters. To begin, Process 400 identifies and selects at least one gene for heterologous expression in yeast (401). The choice of gene(s) for expression would depend on the desired outcome. For example, to produce a biosynthetic compound, one would likely select to express all, or a subset, of the genes within a biosynthetic gene cluster of a particular organism. Once the gene(s) have been selected, Process 400 then appropriates DNA molecules having the coding sequence of the selected genes (403). As is well known in the art, there are many ways to appropriate DNA molecules, which include chemical synthesis, extraction directly from the biological source, or amplification of a gene by polymerase chain reaction (PCR).

[0183] Process 400 then uses the appropriated DNA molecules to assemble these molecules into an expression vector having production-phase promoters (405). There are many ways to assemble DNA expression vectors that are well known in the art, which include popular methodologies such as homologous recombination and restriction digestion with subsequent ligation. After assembly, the resultant expression vectors can be expressed in Saccharomyces yeast to obtain the desired outcome (407).

### Yeast Homologous Recombination for Plasmid Construction and Direct Plasmid Sequencing

[0184] Each of the one or more expression vectors may contain one or more promoters suitable for expression of a heterologous gene in a model host system. Each expression vector may contain a single coding sequence or multiple coding sequences. Multiple coding sequences may be functionally linked to a single promoter, for example via an internal ribosome entry site, or may be linked to multiple promoters. The expression vectors may also contain additional elements to regulate or increase the transcriptional activity, for example enhancers, polyA sequences, introns, and posttranscriptional stability elements. The expression vectors may also contain one or more selectable markers.

[0185] To improve high-throughput assembly and characterization of orphan biosynthetic systems or other systems, an automated DNA assembly pipeline using yeast homologous recombination, (YHR), as its core technology was developed. An example of the design strategy for assembling DNA parts for this pipeline is illustrated in FIG. 10A. In one embodiment a method is provided for assembling synthetic gene clusters with heterologous regulation. DNA polynucleotides coding for a series of distinct promoters and terminators may be obtained in bulk and used for a variety of different synthetic gene clusters. Once a gene cluster of interest is identified the coding sequences are determined and then all coding sequences are synthesized with a flanking sequence (assembly overhang) on each side. The assembly overhangs, encode either for the flanking promoter and terminator if the gene is small enough to be ordered as a single piece, or for the adjacent gene fragments for longer sequences. The length of the flanking sequences may vary, In some cases, the flanking sequences may be about 30 bp, 40 bp, 50 bp, 60 bp, 70 bp, 80 bp, 90 bp, 100 bp, 30-100 bp, 30-70 bp, 40-60 bp, 40-80 bp, or 45-55 bp in length. Placing assembly overhangs exclusively on the unique coding sequence fragments allows for all regulatory cassettes to be generated in bulk and stockpiled as the same fragments are used in all assemblies. For example, in an assembly involving three or more genes, an auxotrophic marker may be placed between the second terminator and third terminator while no marker is present on the vector. By providing the auxotrophic marker and origin of replication on separate fragments, reaction background was significantly reduced. Additional modest increases in efficiency were observed when the assembly host is lacking a DNA ligase, such as the DNL4 DNA ligase.

[0186] In some embodiments, this disclosure provides a system for generating a synthetic gene cluster via homologous recombination. The system comprises 1 though N unique promoter sequences, 1 through N unique terminator sequences, and 1 through N unique coding sequences. Each terminator sequence may be linked to the following promoter sequence, for example terminator 1 is linked to promoter 2, terminator 2 is linked to promoter 3, and so forth till terminator N−1 which is linked to promoter N. In some cases, promoter 1 and terminator N may be attached to a linear plasmid backbone. Coding sequence 1 is attached to an additional 30-70 base pair sequence on each end such that a first end portion is identical or homologous to the last 30-70 base pairs of promoter 1 and a second end portion is identical or homologous to the first 30-70 base pairs of terminator 1. Coding sequence 2 is attached to an additional 30-70 base pair sequence on each end such that a first end portion is identical or homologous to the last 30-70 base pairs of promoter 2 and a second end portion is identical or homologous to the first 30-70 base pairs of terminator 2. Coding sequence N is also attached to an additional 30-70 base pair sequence on each end such that a first end portion is identical or homologous to the last 30-70 base pairs of promoter N and a second end portion is identical or homologous to the first 30-70 base pairs of terminator N. These DNA fragments may be assembled transforming the 1 through N promoters, terminators and coding sequences into a yeast cell where they are combined through yeast homologous recombination, and then isolating a plasmid containing the 1 through N promoters, terminators and coding sequences from the yeast cell.

[0187] An example of this system is shown in FIG. 10A. In this example N equals four. The system comprises four unique promoters (110, 120, 130 and 140), four unique terminator sequences (210, 220, 230 and 240), and four unique coding sequences (310, 320, 330, and 340). Each of the coding sequences is created with an additional 30-70 base pair sequence that is homologous or identical to the sequence of the preceding promoter and an additional 30-70 base pair sequence that is homologous or identical to the sequence of the subsequent terminator. Thus, coding sequence 310 is flanked by sequence 111 which is identical or homologous to at least a part of sequence 110, and sequence 211 which is identical or homologous to an least a part of sequence 210. Coding sequence 320 is flanked by sequence 121 which is identical or homologous to at least a part of sequence 120, and sequence 221 which is identical or homologous to an least a part of sequence 220. Coding sequence 330 is flanked by sequence 131 which is identical or homologous to at least a part of sequence 130, and sequence 231 which is identical or homologous to an least a part of sequence 230. Coding sequence 340 is flanked by sequence 141 which is identical or homologous to at least a part of sequence 140, and sequence 241 which is identical or homologous to an least a part of sequence 240. In this example promoter sequence 110 and terminator sequence 240 are attached to the ends of a linearized plasmid backbone, and the DNA fragment comprising terminator 210 and promoter 120 further comprises an auxotrophic marker (400). Terminator 210 is linked to promoter 120, terminator 220 is linked to promoter 130, and terminator 230 is linked to promoter 140.

[0188] As shown in FIG. 10B, once the DNA sequences from FIG. 10A are transfected into a yeast cell the homologous sequences are paired up and the fragments are linked together through yeast homologous recombination. The resultant DNA plasmid is illustrated in FIG. 10C.

[0189] Traditionally, for yeast homologous recombination plasmid assemblies, plasmid DNA is isolated from assembly clones and transformed into E. coli in order to obtain sufficiently pure DNA to enable sequencing. The necessity of this step arises from the relatively low plasmid yields from yeast and the large amounts of contaminating genomic DNA in every sample. This disclosure provides a method by which plasmid DNA may be sequenced directly out of yeast. This may be achieved by a modified plasmid prep in which the majority of contaminating DNA is removed by treatment with an exonuclease enzyme. Any enzyme with exonuclease activity and free of endonuclease activity may be used in this step. Examples of exonuclease enzymes include but are not limited to: Lambda Exonuclease, RecJf, Exonuclease III (E. coli), Exonuclease I (E. coli), Exonuclease T, Exonuclease V (RecBCD), Exonuclease VIII, truncated, Exonuclease VII, T5 Exonuclease, and T7 Exonuclease. In some cases, the exonuclease is Exonuclease V. If an exonuclease with activity for single stranded DNA (ssDNA) and not double stranded DNA (dsDNA) is to be used, then the DNA may first be heated to denature the dsDNA. In some cases, the DNA may be treated with a topoisomerase to relax supercoiled plasmids. In some cases, the DNA may not be treated with a topoisomerase. Once the plasmid DNA has been purified by this method sequencing libraries can be prepared. FIG. 10D demonstrates the increase in purity observed with the exonuclease treatment. Overall, this pipeline has been applied to the sequencing of >1000 clones. Assemblies of up to 10, 11, 12, 13, 14, 15, 16, 17, 18, 19, 20, 21, 22, 23, 24, 25, 26, 27, 28, 29, 30 or more than 30 unique DNA fragments can be achieved with high efficiency. FIG. 10E shows efficient assembly of 2, 3, 4, 5, 6, 8, 10, 12, and 14 DNA fragments. In some cases a strain as described herein allows DNA assembly via homologous recombination with an efficiency of at least 60%, 70%, 80%, 90%, 100%, 110%, 120%, 130%, 140%, 150%, or more than 150% as compared to DNA assembly in BY.

[0190] To increase the efficiency of assemblies by yeast homologous repair, the relative efficiencies of BY4743 and BY4743ΔDNL4 were tested; a strain in which the DNL4 ligase, involved in non-homologous end joining, has been deleted. FIG. 11A illustrates efficiencies of several plasmid assemblies done in both strains, demonstrating the deletion of the DNL4 DNA ligase does consistently serve as the more efficient assembly background.

[0191] The sequencing of plasmid DNA directly out of yeast as in FIG. 11E (e.g. without transforming into another host such as E. coli as in FIG. 11D) is an advantage of the methods described herein. In establishing these methods, multiple means of preparation for both the plasmid DNA and the next-generation sequencing (NGS) library prep were tested. Shown in FIG. 11B is a comparison of sequencing efficiency using DNA prepared both from colonies picked from plates and cell pellets collected from 1 ml of liquid culture. These data show that these approaches generate samples of equivalent purity.

[0192] Initially, the platform utilized an NGS library preparation in which the purified, exonuclease treated plasmid DNA was ultrasonically sheared, followed by end repair, A-tailing, and adaptor ligation. In order to decrease labor and increase throughput, a recently published modification of the Illumina NexeraXT transposase based prep was performed (M. Baym, et al., PLoS One 10:e01280367, 2015). Ultrasonic shearing necessitated the serial processing of multiple plates of clones while tagmentation allows for parallel processing of multiple plates. FIG. 11C demonstrates that this modified Nextera preparation provides equivalent efficiency as compared to the standard approach.

[0193] This approach may be suitable for multiple DNA preparation methods in multiple strain backgrounds. Additionally, it was shown that this approach is compatible with various library preparations for sequencing on Illumina platforms. It is anticipated that this approach could be easily modified to function in sequencing workflows using alternate sequencing platforms such as those provided by Pacific Bioscience and Oxford Nanopore technologies.

### Host Cells

[0194] The expression vectors may be transfected into a host cell to produce secondary metabolites. The host cell may be any cell capable of expressing the coding sequences from the expression vectors. The host cell may be a cell which can be grown and maintained at a high density. For example the host cell may be one which may be grown and maintained in a bioreactor or fermenter. The host cell may be a fungal cell, a yeast cell, a plant cell, an insect cell or a mammalian cell.

[0195] In some cases the host cell is bacterial. The bacteria may be a Proteobacteria such as a Caulobacteria, a phototrophic bacteria, a cold adapted bacteria, a Pseudomonads, or a Halophilic bacteria; an Actinobacteria such as Streptomycetes, Norcardia, Mycobacteria, or Coryneform; a Firmicutes bacteria such as a Bacilli, or a lactic acid bacteria. Examples of bacteria which may be used include, but are not limited to: Caulobacter crescentus, Rodhobacter sphaeroides, Pseudoalteromonas haloplanktis, Shewanella sp. strain Ac10, Pseudomonas fluorescens, Pseudomonas putida, Pseudomonas aeruginosa, Halomonas elongata, Chromohalobacter salexigens, Streptomyces lividans, Streptomyces griseus, Nocardia lactamdurans, Mycobacterium smegmatis, Corynebacterium glutamicum, Corynebacterium ammoniagenes, Brevibacterium lactofermentum, Bacillus subtilis, Bacillus brevis, Bacillus megaterium, Bacillus licheniformis, Bacillus amyloliquefaciens, Lactococcus lactis, Lactobacillus plantarum, Lactobacillus casei, Lactobacillus reuteri, and Lactobacillus gasseri.

[0196] In some cases the host cell is a fungal cell. In some cases, the host cell is a yeast cell. Examples of yeast cells include, but are not limited to Saccharomyces cerevisiae, Saccharomyces pombe, Candida albicans, and Cryptococus neoformans. In some cases the host cell may be a filamentous fungi, such as a mold. Examples of molds include, but are not limited to Acremonium, Alternaria, Aspergillus, Cladosporium, Fusarium, Mucor, Penicillium, and Rhizopus. In some cases, the host cell may be an Acremonium cell. In some cases, the host cell may be an Alternaria cell. In some cases, the host cell may be an Aspergillus cell. In some cases, the host cell may be an Cladosporium cell. In some cases, the host cell may be an Fusarium cell. In some cases, the host cell may be a Mucor cell. In some cases, the host cell may be a Penicillium cell. In some cases, the host cell may be a Rhizopus cell.

[0197] In some cases, the host cell is an insect cell. In some cases the host cell is a mammalian cell. Examples of mammalian cell lines include HeLa cells, HEK293 cells, B16 melanoma cells, Chinese hamster ovary cells, or HT1080. In some cases, the host cell is a plant cell. In some cases, the host cell may be part of a multicellular host organism.

[0198] In some cases, the host cell is a genetically engineered cell. The yeast strain BJ5464 has historically been a workhorse strain for expression of heterologous proteins. BJ5464 lacks two vacuolar proteases genes (PEP4 and PRB1), which makes the strain useful for biochemical studies, owing to reduced protein degradation. However, BJ5464 has several problems that limit its utility. It has a high rate of petite cell formation, which results in offspring that cannot respire (grow on ethanol as a carbon source) and cannot express the respiration-induced promoters used in this project. It is not genetically tractable because it cannot sporulate, and its non-deletion auxotrophic markers prevent facile genome editing. Finally, BJ5464 is slow growing.

[0199] This disclosure includes a new yeast super host based on the BY background. BY is a direct descendent of the yeast genome sequence reference strain and contains the complete deletions of auxotrophic markers that facilitate genome editing. It is the basis of the barcoded deletion collection, which has led to a wealth of genetic and chemico-genomic data. However, it also has major problems limiting its utility. In particular, it has the poorest sporulation frequency and highest petite frequency of all common lab strains.

[0200] The petite phenotype arises due to a defect in aerobic respiration. Petite yeasts are unable to grow on non-fermentable carbon sources (for example glycerol or ethanol), and form small anaerobic-sized colonies when grown in the presence of fermentable carbon sources (for example glucose). The phenotype results from mutations in the mitochondrial genome, loss of mitochondria, or mutations in the host cell genome.

[0201] The genes and single nucleotide polymorphisms (SNPs) responsible for the sporulation and respiration defects have been identified (FIG. 12). The sporulation defect may be repaired by a series of genetic crosses to a previously repaired strain. The respiration problem caused by mitochondrial genome instability may also be corrected using genome editing. Genome editing may be performed with any method know in the art, such as the 50:50 method. (J. Horecka and R. W. Davis. Yeast 31:103-12, 2014). In some cases, an improved version of Mega 50:50 may be used in which a double stranded break is introduced into the genomic locus to be modified, increasing efficiency by several orders of magnitude (J. D. Smith, et al., Mol. Syst. Biol. 13:913, 2017).

[0202] In some cases, the host cell may be a cell which has been engineered to repair a sporulation defect. For example, the host cell may be a fungal cell with a repaired sporulation defect. In some cases, the host cell is a yeast cell with a repaired sporulation defect. In some cases, the host cell is a BY yeast cell in which the sporulation defect has been repaired, as in FIG. 12.

[0203] In some cases, the host cell may be a cell which has been engineered to repair a respiratory defect or a mitochondrial genome instability defect. For example, the host cell may be a fungal cell with a repaired mitochondrial stability defect. In some cases, the host cell is a yeast cell with a repaired mitochondrial stability defect. In some cases, the host cell is a BY yeast cell in which the mitochondrial genome instability defect has been repaired, as in FIG. 12. In some cases, the host cell may be a cell in which both a sporulation defect and a mitochondrial genomic instability defect have been repaired. Using the genetic crosses and genome engineering methods discussed above and the genomic repairs outlined in FIG. 12 the BY strain was engineered to repair the mitochondrial genome instability. An unexpected benefit of repairing the mitochondrial genome instability defect was that the strains grew faster on non-fermentable carbon sources, such as ethanol (see FIGS. 13 and 14A). This is commonly the growth condition of choice for expression of heterologous genes, which are often linked to production-phase promoters activated by growth on non-fermentable carbon sources.

[0204] In some cases, the host cell may be genetically engineered to lack a gene involved in non-homologous end joining. The lack of such a gene may increase the efficacy of homologous recombination in such an engineered cell. The appropriate genes to delete may vary in each host. As an example, an engineered yeast host cell may lack a ligase such as the DNL4 DNA ligase. An engineered bacterial host cell may lack one or both of a Ku homodimer and the multifunctional ligase/polymerase/nuclease LigD. Other genes which may be involved in non-homologous double stranded break repair, depending on species, include: Mre11, Rad50, Xrs2, Nbs1, DNA-PKcs, Ku70, Ku80, DNA ligase IV, XLF, Artemis, XRCC4, Dn14, Lif1, XLF also known as Cernunnos, Nej1 and Sir2.

[0205] DHY strains have utility for expression of heterologous genes for heterologous compound production, as well as ability to perform homologous recombination and DNA assembly. This combination of abilities in one strain allows DNA assembly and production of heterologous compounds in the same strain, whereas previously these two steps were separated in previous types of yeast (BY for DNA assembly and BJ5464 for expression and small molecule production).

[0206] These improvements can provide the DHY strain collection with a number of advantages over previous strains, particularly the BY strains: DHY can be faster-growing, result in fewer petite colonies (respiration-deficient), be genetically tractable, allow better expression from ADH2-like promoters, and allow both DNA assembly and production of heterologous products in the same strain (FIGS. 14B and 14C).

[0207] In some embodiments, a genetically engineered host cell lacks one or more conditionally essential genes which can be provided by a plasmid or other DNA vector. This allows for the selection of cells which are expressing the DNA vector. Examples of genes which may be used for this are auxotrophic genes which are required for biosynthesis of certain metabolites or genes for resistance to a toxin. Auxotrophic genes are only required when the specific metabolite they are required for is not present in the culture media. Resistance genes are only required when the toxin which they provide protection from is present.

[0208] Examples of genetically engineered yeast host cells include genetically engineered DHY super-host strains. In some cases, strains are based on the BY4741/BY4742 background (C. B. Brachmann, et al, Yeast, 14:115-32, 1998). Strains may also contain any of the following genetic changes from the BY background: sporulation repair (MKT1(30G) RME1(INS-308A) TAO3(1493Q)), and mitochondrial genome stability and function repair (CA T5(91M) MIP1(661T) SAL1+HAP1+) (see FIG. 12). It should be noted, as would be understood in by persons having ordinary skill in the art, that any and all these genetic changes can be performed in isolation, in part, or in totality. For example, it is expected that the a single genetic change of either MKT1(30G), RME1(INS-308A), or TAO3(1493Q) would result in at least some repair in sporulation activity. Likewise, a single genetic change of either CA T5(91M) or MIP1(661 T) or restoration of function of SAL1 (SAL1+) or HAP1 (HAP1+) would result in at least some increase in mitochondrial genome stability.

[0209] In some cases, a strain may be a prototroph. For example, some strains may require methionine, arginine or lysine in the media. In some cases, a strain may be a full heterozygote for several markers from which any combination of markers can be made by tetrad dissection. For example, heterozygous for genes required for synthesis of histidine, leucine, uracil, lysine and methionine, or heterozygous for genes required for synthesis of histidine, leucine, uracil, lysine and arginine. Some examples of strains are listed in Table 3.

[0210] In some cases, the use of a strain as described herein allows for greater expression of BGC proteins and/or greater production of compounds from the BGCs. In some cases expression of heterologous proteins in a strain described herein is accomplished with an efficiency of at least 70%, 80%, 90%, 100%, 110%, 120%, 130%, 140%, or 150% as compared to heterologous protein expression in BJ5464. In some cases production of heterologous compounds in a strain described herein is accomplished with an efficiency of at least 70%, 80%, 90%, 100%, 110%, 120%, 130%, 140%, or 150% as compared to heterologous compound production in BJ5464.

TABLE 3
Description of strain genotypes

| Strain | Parent | Genotype | Reference |
|---|---|---|---|
| BY4741 | S288C | MATa his3Δ1 leu2Δ0 met15Δ0 | (C. B. Brachmann, et |
| | | ura3Δ0 | al., 1998, cited supra) |
| BY4743 | S288C | MATa/α his3Δ1/his3Δ1 | (C. B. Brachmann, et |
| | | leu2Δ0/leu2Δ0 LYS2/lys2Δ0 | al., 1998, cited supra) |
| | | met15Δ0/MET15 ura3Δ0/ura3Δ0 | |
| BJ5464 | | MATα ura3-52 trp1 leu2-Δ1 his3- | (E. W. Jones, Methods |
| | | Δ200 pep4::HIS3 prb1-Δ1.6R | Enzymol. 194: 428-53, 1991) |
| | | can1 GAL | |
| BY4743ΔDNL4 | S288C | MATa/Matα dnl4Δ/dnl4Δ | (E. A. Winzeler, et al., |
| | | | Science 285: 901-06, |
| | | | 1999) |
| Y800 | | MATa ade2-1 leu2-Δ98 ura3-52 | (N. Burns, et al., Genes |
| | | lys2-801 trp1-1 his3-Δ200 [cir0] | Dev. 8: 1087-105, 1994) |
| DHY213 | BY4741 | MATa his3Δ1 leu2Δ0 ura3Δ0 | n/a |
| | | met15Δ0 SAL1+ HAP1+ | |
| | | CAT5(91M) MIP1(661T) | |
| | | MKT1(30G) RME1(INS-308A) | |
| | | TAO3(1493Q) | |
| JHY693 | DHY213 | MATa his3Δ1 leu2Δ0 ura3Δ0 | n/a |
| | | met15Δ0 SAL1+ HAP1+ | |
| | | CAT5(91M) MIP1(661T) | |
| | | MKT1(30G) RME1(INS-308A) | |
| | | TAO3(1493Q) prb1Δ pep4Δ | |
| JHY651 | DHY213 | MATα his3Δ1 leu2Δ0 ura3Δ0 | n/a |
| | | met15Δ0 SAL1+ HAP1+ | |
| | | CAT5(91M) MIP1(661T) | |
| | | MKT1(30G) RME1(INS-308A) | |
| | | TAO3(1493Q) prb1Δ pep4Δ | |
| | | lys2Δ0 | |
| JHY692 | DHY213 | MATa his3Δ1 leu2Δ0 ura3Δ0 | n/a |
| | | met15Δ0 SAL1+ HAP1+ | |
| | | CAT5(91M) MIP1(661T) | |
| | | MKT1(30G) RME1(INS-308A) | |
| | | TAO3(1493Q) prb1Δ pep4Δ | |
| | | ADH2p-npgA-ACS1t | |
| JHY705 | DHY213 | MATα his3Δ1 leu2Δ0 ura3Δ0 | n/a |
| | | met15Δ0 SAL1+ HAP1+ | |
| | | CAT5(91M) MIP1(661T) | |
| | | MKT1(30G) RME1(INS-308A) | |
| | | TAO3(1493Q) prb1Δ pep4Δ | |
| | | ADH2p-CPR-ACS1t lys2Δ0 | |
| JHY702 | DHY213 | MATa/MATα his3Δ1/his3Δ1 | n/a |
| | | leu2Δ0/leu2Δ0 ura3Δ0/ura3Δ0 | |
| | | met15Δ0/met15Δ0 SAL1+/SAL1+ | |
| | | HAP1+/HAP1+ | |
| | | CAT5(91M)/CAT5(91M) | |
| | | MIP1(661T)/MIP1(661T) | |
| | | MKT1(30G)/MKT1(30G) | |
| | | RME1(INS-308A)/RME1(INS- | |
| | | 308A) | |
| | | TAO3(1493Q/TAO3(1493Q)) | |
| | | prb1Δ/prb1Δ pep4Δ/pep4Δ | |
| | | ADH2p-npgA-ACS1t/ADH2p- | |
| | | CPR-ACS1t met15Δ0/+lys2Δ0/+ | |

### Detection and Characterization of Novel Molecules

[0211] Once a host cell is expressing the coding sequences of the identified gene cluster, a secondary metabolite may be synthesized in the host cell. The secondary metabolite may be identified by any method known in the art. In some cases, the secondary metabolite is identified by comparing a host cell expressing the cluster with a host cell which does not express the cluster. This comparison may utilize chromatography methods to separate different small molecules produced in the cells. For example, column chromatography, planar chromatography, thin layer chromatography, gas chromatography, liquid chromatography, supercritical fluid chromatography, ion exchange chromatography, size exclusion chromatography be done by high performance liquid chromatography (HPLC), mass spectrometry (MS), or by mass spectrometry high performance liquid chromatography (MS-HPLC). Any peaks which appear for the cluster expressing host cell and not from the control host cell indicate the presence of a novel chemical. The comparison between the cluster expressing host cell and the control host cell may comprise a comparison of a cell extract, a culture media, or an extracted cell lysate.

### Compounds Identified

[0212] This disclosure also provides sequences of 43 BGCs, and structures of novel products produced by a subset of these BGCs.

[0213] In one embodiment, this disclosure provides sequences of cryptic BGCs which encode various products, SEQ ID NOs: 67-483. These BGCs may also be reengineered to provide the coding sequences without the endogenous regulatory sequences. In some examples, the coding sequences may be predicted using known bioinformatics methods, experimental data, or obtained from databases such as default predicted gene coordinates (start, stop, and introns) as deposited in GenBank. Once the coding sequences have been identified the sequences may be isolated and cloned into one or more expression vectors for expression in a model host system such as S. cerevisiae.

[0214] The expression vectors may be plasmids, viruses, linear DNA, bacterial artificial chromosomes or yeast artificial chromosomes. Each of the one or more expression vectors may contain one or more promoters suitable for expression of a heterologous gene in a model host system. Each expression vector may contain a single coding sequence or multiple coding sequences. Multiple coding sequences may be functionally linked to a single promoter, for example via an internal ribosome entry site, or may be linked to multiple promoters. The expression vectors may also contain additional elements to regulate or increase the transcriptional activity, for example enhancers, polyA sequences, introns, and posttranscriptional stability elements. The expression vectors may also contain one or more selectable markers.

[0215] The expression vectors may be transfected, or otherwise introduced, into host cells. Examples of host cells include but are not limited to yeast and bacterial cells. For example a host cell may be a S. cerevisiae cell or an E. coli cell. Incubating the expression vectors in the host cells allows for the transcription and translation of the coding sequences to recreate the proteins of the gene cluster. These proteins may then produce a secondary metabolite which can be isolated from the cells or the media in which the cells are grown.

[0216] In another embodiment this disclosure provides host cell extracts containing non-host cell derived products. In some cases, these extracts may be produced by culturing host cells expressing one or more, or all, of the sequences from one of the following groups SEQ ID NOs: 67-76, 77-81, 82-91, 92-97, 98-106, 107-111, 112-118, 119-127, 128-135, 136-153, 154-157, 158-162, 163-172, 173-181, 182-186, 187-191, 192-199, 200-206, 207-211, 212-224, 225-228, 229-235, 236-240, 241-244, 245-255, 256-267, 268-276, 277-285, 286-289, 290-293, 294-307, 308-313, 314-318, 319-324, 325-329, 330-334, 335-341, 342-350, 351-357, 358-367, 368-372, 373-380, 381-388, 389-395, 396-400, 401-406, 407-413, 414-423, 424-427, 428-439, 440-447, 448-453, 454-462, 463-471, 472-480, or 481-483. In some cases, a host cell may express all the sequences from one of the following groups SEQ ID NOs: 67-76, 77-81, 82-91, 92-97, 98-106, 107-111, 112-118, 119-127, 128-135, 136-153, 154-157, 158-162, 163-172, 173-181, 182-186, 187-191, 192-199, 200-206, 207-211, 212-224, 225-228, 229-235, 236-240, 241-244, 245-255, 256-267, 268-276, 277-285, 286-289, 290-293, 294-307, 308-313, 314-318, 319-324, 325-329, 330-334, 335-341, 342-350, 351-357, 358-367, 368-372, 373-380, 381-388, 389-395, 396-400, 401-406, 407-413, 414-423, 424-427, 428-439, 440-447, 448-453, 454-462, 463-471, 472-480, or 481-483. In some cases the host cell(s) may express one or more sequences selected from SEQ ID NOs: 67-483. After culturing the cells, they may be collected, lysed, and the small molecules may be purified from nucleic acid, proteins, complex carbohydrates and lipid containing fractions. The secondary metabolites produced may also be secreted into the cell media. In this case this disclosure also provides a cell media containing secondary metabolites.

[0217] This disclosure also provides compounds isolated from the host cell extracts or media. A compound of this disclosure may be

[chemical structure]

[chemical structure]

[chemical structure]

[0218] Compounds of this disclosure may have useful therapeutic applications, for example in treating or preventing a disease or disorder. Compounds of this disclosure may be used to treat an infection, for example a bacterial, fungal or parasitic infection. Compounds of this disclosure may have antibiotic and/or antifungal activities. Compound 8 and Compound 9 may have antimicrobial, antifungal and/or antibacterial activities. Compounds of this disclosure may have non-medical applications.

[0219] In some embodiments this disclosure provides pharmaceutical compositions comprising of a compound of this disclosure. In some cases a pharmaceutical composition contains at least one of Compounds: 6, 7, 8, 9, 10, 11, 12, 13, 14, 15, and 16. Compositions as described herein may comprise a liquid formulation, a solid formulation or a combination thereof. Non-limiting examples of formulations may include a tablet, a capsule, a gel, a paste, a liquid solution and a cream. The compositions of the present disclosure may further comprise any number of excipients. Excipients may include any and all solvents, coatings, flavorings, colorings, lubricants, disintegrants, preservatives, sweeteners, binders, diluents, and vehicles (or carriers). Generally, the excipient is compatible with the therapeutic compositions of the present disclosure. Generally, the excipient is a pharmaceutically acceptable excipient. The pharmaceutical composition may also contain minor amounts of non-toxic auxiliary substances such as wetting or emulsifying agents, pH buffering agents, and other substances such as, for example, sodium acetate, and triethanolamine oleate.

[0220] In some embodiments this disclosure provides a method of synthesizing a compound described herein. The method may include steps of providing one or more coding sequences of SEQ ID NOs: 67-483 in a suitable vector, or vectors, together with regulatory sequences which will drive expression of the coding sequences in a host cell. The vector, or vectors, are then provided to a host cell, such as for example a yeast cell, and the cells are grown under conditions that allow for the expression of the coding sequences. In some cases, a host cell may be provided with 1, 2, 3, 4, 5, 6, or more than 6 different plasmids. The synthesized compound may be purified from the cell culture by centrifuging the cells to produce a cell pellet and a supernatant. The supernatant and cell pellet may be extracted using either ethyl acetate or acetone, or other suitable organic solvent. For compounds containing carboxylic acid groups, the pH of the supernatant may be adjusted to pH of 4 or less (e.g., 3) with an acid such as HCl prior to extraction. After extraction, both organic phases are combined and evaporated to dryness. The compounds may then be dissolved in the desired solvent and further purified using standard purification methods.

[0221] Although the present disclosure has been described in certain specific aspects, many additional modifications and variations would be apparent to those skilled in the art. In particular, any of the various processes described above can be performed in alternative sequences in order to achieve similar results in a manner that is more appropriate to the requirements of a specific application. It is therefore to be understood that embodiments of the present disclosure can be practiced otherwise than specifically described without departing from the scope and spirit of the present disclosure. Thus, embodiments of the present disclosure should be considered in all respects as illustrative and not restrictive.

### Example 1: Identification of Production Phase Promoters

[0222] Biological data supports the systems and constructs of production-phase promoter DNA vectors and applications thereof. Provided below are several examples of incorporating production-phase promoters into DNA vectors. Some of these vectors were used to produce biosynthetic products from multi-gene clusters derived from various fungal species. Compared to a constitutive promoter system, production-phase promoter systems in accordance with various embodiments produced several-fold greater product.

[0223] Production Phase Promoter Expression Analysis

[0224] Because the ADH2 promoter (SEQ ID NO. 1) has properties of a production-phase promoter, a panel of promoter sequences was compared to the ADH2 promoter to identify other production-phase promoters. To begin, endogenous S. cerevisiae genes were identified that appeared co-regulated with ADH2 in a previous genome-wide transcription study (Z. Xu. et al., Nature 457:1033-37, 2009, the disclosure of which is incorporated herein by reference). In this study, transcription of yeast genes was quantified during mid-exponential growth in several types of growth media. Of the 5171 ORFs examined, 35 appeared co-regulated with ADH2, with co-regulation defined as a greater than two-fold increase in expression with a non-fermentable carbon source (ethanol in a yeast-peptone-ethanol (YPE) media) as compared to a fermentable carbon source (dextrose in a yeast-peptone-dextrose (YPD) media). Because these data were collected at a single time point and assessed transcription of genes in their native context, their ability to co-regulate heterologous genes in a production-phase promoter system required further validation and characterization.

[0225] A detailed characterization of the ability of 34 selected promoters to control expression of heterologous genes was performed. For this specific purpose, a promoter was defined as the shorter of (a) 500 bp upstream of the start codon, or (b) the entire 5′ intergenic region. Each promoter was cloned upstream of the gene for monomeric enhanced GFP (eGFP) and integrated each of the resulting cassettes in a single copy at the ho locus of individual strains. Control strains were included in which strong constitutive FBA1 and TDH3 promoters were cloned upstream of eGFP in an identical manner. The 35 promoter sequences can be found in SEQ ID NOs. 2-35.

[0226] In order to compare the 35 putative production-phase promoters, the expression of eGFP protein was assessed over 72 hours in each strain by flow cytometry in media with both fermentable (YPD) and non-fermentable (YPE) carbon sources (FIGS. 16 and 17). All cultures were started in YPD media and analysis of eGFP expression began when cells were in the midst of exponential fermentative growth (OD₆₀₀=0.4, 0 hrs). At this point, cells were either left to continue growth in YPD or spun-down and resuspended in YPE. Consistent with previous work, pADH2 was entirely repressed at the point where the experiment commenced (during exponential fermentative growth, 0 hrs) unlike the constitutive promoters pTDH3 and pFBA1, which were expressed at near maximum levels regardless of phase. Moderate expression from pADH2 was observed after a further 6 hours in YPD culture or following a growth media switch to YPE. Within 24 hrs, expression reached levels exceeding those observed in the strong constitutive systems. Cytometry histograms and fluorescence microscopy demonstrated that within 48 hours, >95% of all cells with pADH2 and pPCK1 driven expression were fluorescing above background (FIG. 18). Protein expression levels spanned 15-50 fold, with most showing little or no expression until 24 hours into the culture (FIGS. 16 and 17). Transgene expression driven by the PCK1, MLS1, and ICL1 promoters (SEQ ID NOs. 2-4) not only showed the same timing of expression as pADH2, but also expressed at an equivalently high level. The promoters of genes YLR307C-A, YGR067C, IDP2, ADY2, GAC1, ECM13 and FAT3 (SEQ ID NOs. 5-11) displayed semi-strong transgene expression (FIG. 16). In addition, the promoters of genes PUT1, NQM1, SFC1, JEN1, SIP18, ATO2, YIG1, and FBP1 (SEQ ID NOs. 12-19) displayed weak of transgene expression (FIGS. 16 and 17). The promoter PHO89 (SEQ ID NO. 20) did not exhibit strong repression in during the growth phase (FIGS. 16, 0 and 6 hours). The results of the other sequences are also depicted in FIG. 16 (SEQ ID NOs. 22-36). The constitutive promoters pTDH3 and pFBA1 (SEQ ID NOs. 50 and 52) were used as controls (FIGS. 16-18).

[0227] The above analysis identified a large set of co-regulated promoters spanning a wide range of expression levels, three of which were as strong as pADH2. However, a more extensive set of strong production-phase promoters is desirable for assembly of constructs having multi-gene pathways, especially pathways having more than four genes. To identify other production-phase promoter candidates, the genomes of five closely related species within the S. sensu stricto complex were examined (FIG. 19). The promoter region was identified for the closest ADH2 gene homolog in the genomes of Saccharomyces bayanus, Saccharomyces paradoxus, Saccharomyces mikitae, Saccharomyces kudriavzevii, and Saccharomyces castellii. Multiple sequence alignment of the upstream activation sequences (UAS) revealed that nearly all sequences (except that from S. castellii) are highly conserved across this region, suggesting a potential for regulation similar to that of S. cerevisiae ADH2 (FIG. 20, SEQ ID NOs. 36-40). In order to be used for single-step pathway assembly, all promoter sequences must be sufficiently unique to prevent undesired recombination between each other. Therefore, the pairwise identities for each of the Saccharomyces sensu stricto ADH2 promoter pairs were analyzed (FIG. 21). The most similar promoter to the S. cerevisiae ADH2 promoter is that from S. paradoxus, with 83% identity, including a single 40 bp stretch located near the center of the promoter. This homology is significantly less than the 50-100 bp typically used for assembly by yeast homologous recombination, and recombination events between sequences with this level of identity occur at very low frequency, suggesting that these promoters should be compatible with a multi-gene assembly technique utilizing yeast homologous recombination as described above.

[0228] As with the endogenous yeast promoter candidates, these other putative Saccharomyces promoters required detailed characterization of induction profiles. DNA encoding each of these promoter sequences was obtained by commercial synthesis and characterized expression of eGFP from each promoter in the same manner as the endogenous yeast promoters (FIGS. 22 and 23). Of the five Saccharomyces sensu stricto pADH2s tested (SEQ ID NOs. 36-40), the promoters derived from S. paradoxus, S. kudriavzevii, and S. bayanus show timing and strength of expression equivalent to that of S. cerevisiae pADH2. In combination with the endogenous yeast promoters, these three additional Saccharomyces pADH2s expand the number of strong promoters with the desired induction profile.

[0229] Expression of Compound Product Pathways Using the Production-Phase Promoter System

[0230] To study the utility of the new promoter set for heterologous expression of a biosynthetic system, production of fungal-derived dehydrozearalenol (1) and indole-diterpene (2) was examined (FIG. 24, Compounds 1 & 2). The biosynthesis of the indole-diterpene compound resulted from the coordinated expression of four in Aspergillus tubingensis genes (FIG. 25, SEQ ID NOs. 59-62). Two versions of each pathway were constructed: one having all production-phase promoters, and the other having all constitutive promoters (FIG. 24). The production-phase promoter system utilized the pADH2 from S. cerevisiae (SEQ ID NO. 1), pADH2 from S. bayanus (SEQ ID NO. 38), and pPCK1 (SEQ ID NO. 2) and pMLS1 (SEQ ID NO. 3) from S. cerevisiae. In the constitutive system, transcription was driven by four frequently used strong constitutive promoters: pTEF1, pFBA1, pPCK1, and pTPI1 (SEQ ID NOs. 51-54). Each indole-diterpene system was constructed on a single plasmid harboring four expression cassettes: promoter::GGPPS::tADH2; promoter::PT::tPGI1; promoter::FMO::tENO2; and promoter::Cyc::tTEF1; wherein, the promoter sequences corresponded to either the production-phase or the constitutive promoters (FIG. 24). Similar constructs were built for the dehydrozearalenol compound with the two genes HR-PKS and NR-PKS (SEQ ID NOs. 63 and 64). All plasmids were constructed using yeast homologous recombination. It should be noted that pADH2 sequences from S. cerevisiae and S. bayanus (61% identity) are sufficiently unique for this type of assembly. The production of compounds 1 and 2 produced by S. cerevisiae BJ5464/npgA/pRS424 transformed with each of these plasmids were measured over seventy-two hours in YPD batch culture (FIG. 26). An 80-fold and 4.5-fold increase in titer of compound 1 and 2 was observed for the system using the production-phase promoters as compared to the constitutive system.

[0231] Materials and Methods Supporting the Production-Phase Promoter Experiments

[0232] General techniques, reagents, and strain information: Restriction enzymes were purchased from New England Biolabs (NEB, Ipswich, 25 MA). Cloning was performed in E. coli DH5α. PCR steps were performed using Q5® high-fidelity polymerase (NEB). Yeast dropout media was purchased from MP Biomedicals (Santa Ana, Calif.) and prepared according to manufacturer specifications. Promoter characterization experiments were performed in BY4741 (MATα, his3Δ1 leu2Δ.0 met15Δ.0 ura3Δ0) while all experiments involving the production of 1 were performed in BJ5464-npgA which is BJ5464 (MATaura3-52 his3Δ200 leu2Δ.1 trp1 pep4::HIS3 prb1.Δ.1.6R can1 GAL) with two copies of pADH2-npgA integrated at 6 elements. All Gibson assemblies were performed as previously described using 30 bp assembly overhangs.

[0233] Construction and characterization of promoter-eGFP reporter strains: All promoters were defined as the shorter of 500 base pairs upstream of a gene's start codon or the entire 5′ intergenic region. All promoters from S. cerevisiae were amplified from genomic DNA, while ADH2 promoters from all Saccharomyces sensu stricto were ordered as gBlocks from Integrated DNA Technologies (IDT, Coralville, Iowa). Minimal alterations were made to promoters from S. kudriavzevii and S. mikitae in order to meet synthesis specifications. In all constructs, eGFP was cloned directly upstream of the terminator from the CYC1 gene (tCYC1). pRS415 was digested with Sacl and Sall and a Notl-eGFP-tCYC1 cassette was inserted by Gibson assembly generating pCH600. Digestion of pCH600 with Accl and Pmll removed the CEN/ARS origin, which was replaced by 500 bp sequences flanking the ho locus using Gibson assembly to yield plasmid pCH600-HOint. Each of the promoters to be analyzed was amplified with appropriate assembly overhangs and inserted into pCH600-HOint digested with Nod to generate the pCH601 plasmid series. Digestion of the pCH601 plasmid series with Ascl generated linear integration cassettes which were transformed into S. cerevisiae BY4741 by the LiAc/PEG method. Correct integration was confirmed by PCR amplification of promoters and Sanger sequencing.

[0234] For characterization, all strains were initially grown to saturation overnight in 100 μl of YPD media. These cells were then reinoculated at an OD₆₀₀ of 0.1 into 1 ml of fresh YPD and allowed to grow to OD₆₀₀=0.4 to reach mid-log phase growth (approximately 6 hrs). 500 μl of each culture was pelleted by centrifugation and resuspended in YPE broth for YPE data while the remaining 500 μl was used for YPD data. The 0 hour time point was collected immediately after resuspension. For each time point, 10 μl of culture was diluted in 2 ml of DI water and sonicated for three short pulses at 35% output on a Branson Sonifier. Expression data were collected for 10,000 cells using a FACSCalibur flow cytometer (BD Bioscience) with the FL1 detector. Data were analyzed in R using the flowCore package.

[0235] Construction of plasmids to produce compounds in S. cerevisiae: The sequences for genes assembled on IDT producing plasmids are contained in the supporting information. Regulatory cassettes of promoters and terminators were fused using overlap extension PCR. All genes and regulatory cassettes were amplified by PCR, ensuring 60 bases of homology between all adjacent fragments. 500 ng of each purified fragment was combined with 100 ng of pRS425 linearized with Not1 and transformed into S. cerevisiae BJ5464/npgA. Sixteen clones were picked from each assembly plate and grown to saturation in 5 ml CSM-Leu medium. Plasmids were isolated, transformed into E. coli and purified prior to sequence confirmation using the Illumina MiSeq platform. Detailed plasmid maps for pCHIDT-2.1 and pCHIDT-2c are shown in FIG. 27A illustrates the primers used and the assembly strategy (SEQ ID NOs. 65 and 66).

[0236] Examining the productivity of indole diterpene generating systems Plasmids pCHIDT-2.1 and pCHIDT-2c were transformed into BJ5464/npgA with pRS424 as a source of tryptophan overproduction (see, e.g., FIG. 27B). Triplicates of each strain were inoculated into CSM-Leu/-Trp medium and grown overnight (OD₆₀₀=2.5-3.0). Each culture was used to inoculate 20 ml cultures in YPD medium at an OD₆₀₀=0.2 and incubated with shaking at 30° C. for 3 days. Every 24 hrs, 2 mls were sampled from each culture. Supernatants were clarified by centrifugation and extracted with 2 ml ethyl acetate (EtOAc). Cell pellets were extracted with 2 ml 50% EtOAc in acetone. 500 μl each of pellet and supernatant extracts were combined and dried in vacuo. Samples were resuspended in 100 μl HPLC grade methanol and LC-MS analysis was conducted on a Shimadzu LC-MS-2020 liquid chromatography mass spectrometer with a Phenomenex Kinetex C18 reverse-phase column (1.7 μm, 100 Å, 100 mm×2.1 mm) with a linear gradient of 15% to 95% acetonitrile (v/v) in water (0.1% formic acid) over 10 min followed by 95% acetonitrile for 7 min at a flow rate of 0.3 mL/min.

### Example 2: Identification of Gene Clusters which Produce Compounds that Interact with a Target Protein

[0237] Thanks to next-generation sequencing, thousands of bacterial and fungal genomes have been sequenced. These species are known to be rich sources of secondary metabolites, for example penicillin, rapamycin, and the statins. These secondary metabolites are small molecules, enzymatically synthesized by the products of one or more genes, often arrayed contiguously in a “biosynthetic gene cluster”.

[0238] This disclosure describes a method for identifying specific biosynthetic gene clusters, where the target of the secondary metabolite is a specific protein, and expressing that secondary metabolite in a host organism.

[0239] In certain cases, for example, when a secondary metabolite is being used as a weapon against other organisms, the secondary metabolite may also be toxic to the organism that produces it. In these cases, the producing organism may defend itself against self-harm in a number of ways: by pumping the secondary metabolite out of the cell; by enzymatically negating the secondary metabolite; or by producing an additional version of the target protein that is less sensitive or insensitive to the secondary metabolite.

[0240] In those cases where the organism produces an additional version of the target protein, this “protective” version of the gene is often colocalized with the biosynthetic gene cluster. Although different to the gene that produces the target protein, the protective version should maintain detectable homology to the target protein. This method takes advantage of this homology to identify those biosynthetic gene clusters that contain or are adjacent to a protective homolog of the target protein.

[0241] The input data required for this method are a list of biosynthetic gene clusters (e.g., polyketide synthase clusters, non-ribosomal peptide synthetase clusters) and a list of target proteins (i.e., proteins whose activity are to be modulated with secondary metabolites). The biosynthetic clusters may be identified based on the presence of certain protein domains, for example by the software program antiSMASH. The target proteins may be chosen based on their quantitative likelihood of being drug targets.

[0242] The output of this method is a score for each biosynthetic cluster, where clusters with higher scores represent those that are more likely to produce secondary metabolites targeting specific proteins of interest.

[0243] A score was constructed for each biosynthetic cluster based on the following factors:
[0244] 1. the presence of one or more homologs of a target protein within or adjacent to the cluster, as determined by a homology search (e.g., using the tblastn algorithm, with a maximum score granted when one homolog is found)
[0245] 2. the confidence in homology of the target to genes in a cluster (e.g., according to the tblastn algorithm, with an increasing score for lower e-values, and an upper bound threshold of 1e-30)
[0246] 3. the fraction of the homologous gene that meets a certain threshold of identity (e.g., with an increasing score for more identity, and a lower bound threshold of 25% identity)
[0247] 4. the total number of genes homologous to the target protein present in the entire genome of the organism (e.g., with a maximum score granted to cases with 2-4 homologs per genome)
[0248] 5. the homology of the gene in or adjacent to the cluster to the target protein (e.g., using the blastx algorithm, with a maximum score granted when the gene in the biosynthetic gene cluster's closest homolog in the target protein's genome is the target protein itself)
[0249] 6. the phylogenetic relationship of the target protein to the gene in the cluster (e.g., with an increasing score for homologs in the gene cluster that clade with the target protein, with confidence assigned by a bootstrap test or Bayesian inference of phylogeny, and a lower bound threshold defined as homologs in a phylogenetic context that appear in a clade with bootstrap value of 0.7 or Bayesian posterior probability of 0.8)
[0250] 7. the expected number of homologs of the target in or adjacent to the biosynthetic cluster (e.g., with a greater score the lower the probability of a homolog of the target being present in or adjacent to a biosynthetic cluster of a certain size, given the number of total homologs in the genome, as determined by a permutation test)
[0251] 8. the likelihood that the target protein is essential for viability, growth, or other cellular processes in the native environment, e.g., through evidence that deletion of homologs in related organisms (such as S. cerevisiae) render the organism inviable
[0252] 9. synteny of the gene cluster with related species (e.g., with a maximum score if the entire cluster, including the target homolog, is conserved across several species)
[0253] 10. the functional class of the target homolog (e.g., with a greater score if the gene is in a protein complex already known to be targeted by secondary metabolites)
[0254] 11. the presence of specific promoters adjacent to the target homolog (e.g., with a greater score when there is a bidirectional promoter upstream of the target homolog and a biosynthetic gene)
[0255] 12. the presence of specific regulatory elements in the biosynthetic gene cluster (e.g., with a greater score when there is a transcription factor binding site that is shared between target genes and/or biosynthetic genes in the cluster)
[0256] 13. the presence of target homologs outside the cluster (including on other chromosomes) that are co-regulated with some or all of the genes in the biosynthetic cluster (e.g., with a greater score when biosynthetic gene clusters are co-regulated with putative target homologs)
[0257] 14. the presence of protein- and DNA-sequence-derived features within the clusters that have successfully been shown to produce secondary metabolites (e.g., with a greater score when a gene in a cluster shares a domain—as determined by a Hidden Markov Model (HMM)—with a cluster that has produced a secondary metabolite in one of the host organisms)

[0258] The above score was calibrated with reference to a set of “true positives” (i.e., cases where there are one or more known targets in or adjacent to a biosynthetic gene cluster that produces a small molecule known to target that protein).

[0259] This algorithm has been programmed in the Python programming language and has been applied to a set of more than 1,000 fungal genomes (and more than 10,000 biosynthetic gene clusters) to produce a list of potentially relevant biosynthetic clusters.

[0260] Expressing Biosynthetic Clusters in a Host Organism

[0261] Given the highest scoring biosynthetic clusters as defined by the algorithm above, DNA was synthesized for each of the genes in those clusters. The DNA was cloned into a host organism (e.g., S. cerevisiae, also known as baker's yeast) for expression. The host organism synthesized the proteins from the gene cluster, which produces a secondary metabolite. Using HPLC and mass spectrometry, the secondary metabolite-expressing strain can be compared to an unmodified strain and affirm the presence of a new secondary metabolite.

[0262] This method has been successfully applied to the production of several secondary metabolites where there is evidence, based on the above method, for what the target protein of the secondary metabolite should be:
[0263] An secondary metabolite derived from a biosynthetic gene cluster containing a homolog of the human gene SOS1;
[0264] An secondary metabolite derived from a biosynthetic gene cluster containing a homolog of the human gene BRSK1; and
[0265] An secondary metabolite derived from a biosynthetic gene cluster containing a homolog of the human gene DDX41.

[0266] A further example of a gene cluster which produces a product, for which there is evidence suggesting the target, is shown in FIG. 15A.

### Example 3: Prioritization of Novel Biosynthetic Gene Clusters by Phylogenetic Analysis

[0267] Two classes of fungal BGCs; those with either a polyketide synthase (PKS), or an UbiA-type sesquiterpene cyclase (UTC) as their core enzyme were chosen for analysis.

[0268] A computational pipeline was developed to prioritize PKS and UTC containing BGCs for heterologous expression. 581 sequenced fungal genomes were analyzed from the publicly available GenBank database of the National Center for Biotechnology Information (NCBI, as of July 2015). Each genome was analyzed for BGCs using antiSMASH2, identifying 3512 BGCs harboring an iterative type 1 PKS (iPKS) and 326 BGCs harboring a UTC homologue. Phylogenetic trees of each of these enzyme types were generated with identified characterized homologs from the MIBiG database20. BGCs were primarily selected from clades having few characterized members (FIG. 28A, FIG. 29A). The selected BGCs were found in the genomes of both ascomycetes and basidiomycetes. Basidiomycetes are, in general, more difficult to culture with fewer tools for genetic manipulation available as compared to ascomycetes. As a result, BGCs from basidiomycetes are under-studied, with few PKS-containing clusters deposited in MIBig, suggesting that these organisms represent a reservoir of BGCs capable of producing compounds with interesting new structures.

[0269] The coding sequences of all BGCs were ordered as synthetic constructs according to the default predicted gene coordinates (start, stop, and introns) as deposited in GenBank and clusters are described in Table 4.

[0270] Shown in FIG. 28A is a cladogram of the ketosynthase sequences of the 3512 iPKS sequences identified in this study. Of these, 28 were selected and the associated BGC containing the selected iPKS was analyzed using heterologous expression. Selected BGCs met the following criteria: (a) genetic structure was conserved across 3 or more species, (b) exhibited canonical domain architecture, and (c) contained an in-cis or proximal in-trans protein capable of releasing the polyketide from the carrier protein of the PKS (FIG. 30A). Seven of these clusters were derived from distinct clades comprised entirely of sequences from basidiomycetes (FIG. 28A).

[0271] The 28 selected PKS clusters were edited according to the methods described here to form expression vectors suitable for expression of the cluster coding sequences in yeast cells. The host cells were incubated and analyzed for the presence of novel chemical compounds by HPLC, as described in the methods section below. Of the PKS clusters selected from ascomycetes, 13 produce compounds. The most notable is the PKS1 cluster, which only contains an iPKS, a hydrolase, and the genes for three tailoring enzymes: a Cytochrome p450 (P450), a Flavin-dependent monooxygenase (FMO), and a Short-chain dehydrogenase/reductase (SDR).

[0272] For the study of fungal UTCs, the phylogenetic tree shown in FIG. 29A was constructed based on the UbiA-type sesquiterpene cyclase, Fma-TC, from the fumagillin biosynthetic pathway. Moreover, the P450, Fma-P450, from the same pathway was shown to be a powerful enzyme catalyzing the 8 e oxidation of bergamotene to generate a highly oxygenated product. UTC BGCs spanning the entirety of the cladogram were selected in FIG. 29A where a cytochrome P450 was proximal to the UTC gene (FIG. 30B). Ultimately, 13 UTC BGCs from both ascomycetes and basidiomycetes were selected for analysis.

[0273] Screening of strains expressing these clusters by LC/HRMS revealed novel spectral features consistent with oxidized sesquiterpenoids being produced by five clusters (FIG. 29A). These results demonstrate that the membrane-bound UTCs represent a general class of terpene cyclase encoded by the genomes of diverse fungi. Several clusters and compounds produced are shown in FIGS. 28B, 28C, 28D, 28E and 28F.

[0274] Including both PKS and UTC BGCs, 24 of the 41 clusters produced measurable compounds, see Table 4 for a summary of the type, species of origin, and productivity of the clusters. Gene annotation errors introduced by incorrect intron prediction may have contributed to this failure rate. Manual inspection of one UTC (TC5) that initially had yielded no products suggested an incorrect intron prediction at the 5′ terminus of the gene. Correction of this intron led to a C-terminal protein sequence that aligned well with known functional UTCs. When tested by heterologous expression in a host cell, the version with the corrected intron produced a compound confirming that incorrect intron prediction is a failure mode in approaches that rely on publicly available gene annotations, (FIG. 29B). These results illustrate the importance of careful gene curation and the need for improved eukaryotic gene prediction, particularly with sequences from taxa with few well-studied members.

[0275] The results summarized in Table 4 demonstrate the utility of the methods herein for the selection of cryptic fungal BGCs. With the tools developed here, strains were built expressing 41 such clusters with 22 (54%) producing detectable levels of products not native to S. cerevisiae. While both basidiomycetes and ascomycetes are known to be prolific producers of bioactive compounds, to date, the bulk of research on the biosynthesis of fungal natural products has been undertaken in ascomycetes. In this study, heterologous expression allowed a large-scale survey of cryptic fungal BGCs from both ascomycetes and basidiomycetes, a less studied and more difficult to culture division of fungi with fewer tools for genetic manipulation. Using this platform, a panel of new products produced by the selected PKS and UTC clusters was identified.

[0276] Methods

[0277] antiSMASH2 software was applied to 581 public fungal genomes deposited in the Genbank database of the National Center for Biotechnology Information (NCBI), to search for type 1 PKS and UbiA-like terpene cyclase gene clusters. This analysis identified 3,512 type 1 PKS gene clusters and 326 UbiA-like terpene gene clusters in 538 fungal genomes.

[0278] Phylogenetic analysis of both sequence sets was performed by building multiple sequence alignments of all protein sequences using MAFFT and building phylogenetic trees as shown in FIG. 28A and FIG. 29A using FastTree 2.

[0279] 28 of the 3,512 sequenced type 1 PKS gene clusters and 13 of the 326 terpene gene clusters were selected for expression in yeast as described above.

### Construction and Culture of Production Strains:

[0280] Production strains were constructed by transforming plasmid DNA isolated out of E. coli (Qiagen miniprep 27106) into the appropriate expression host (JHY692 for PKS containing plasmids, JHY705 for all others) using the Frozen-EZ Yeast Transformation II kit (Zymo Research T2001) followed by plating on the appropriate SDC dropout media (CSM-Leu for PKS containing plasmids, CSM-Ura for all others). For BGCs encoded on at least two plasmids, three biological replicates for each haploid transformant were mated on YPD plates and incubated at 30° C. for 4-16 hrs prior to streaking for single colonies on CSM-Ura/-Leu and incubated at 30′C.

[0281] Small-scale cultures for analysis were begun by picking three biological replicates of each production strain along with empty vector controls into 500 μL of the appropriate SDC dropout medium in a 1 ml deep-well block and grown for approximately 24 hrs at 30′C. 50 μL of overnight culture was used to inoculate 500 μL of each of the production media to be tested in the experiment (generally both YPD and YPEG) in 1 ml deep well blocks. All blocks were covered with gas-permeable plate seals (Thermo Scientific AB-0718) and incubated at 30′C for 72 hrs with shaking at 1000 rpm. Supernatants were clarified by centrifugation for 20 mins at 2800 g and a minimum of 100 μl of clarified supernatant was stored for future analysis. The remainder of the supernatant was discarded and the cell pellets extracted by mixing with 400 μL of 1:1 ethyl acetate:acetone. Cell debris was precipitated by centrifugation for 20 mins at 2800 g and 200 μL of the extraction solvent pipetted to a fresh block and evaporated in a speedvac.

[0282] Prior to analysis, all supernatants were passed through a 0.2 m filter plate while all cell pellet extracts were resuspended in 200 μl of HPLC grade methanol prior to filtering.

[0283] Analysis of Small Scale Cultures:

[0284] LC-MS analysis was conducted on an Agilent 6545 quantitative time-of-flight mass spectrometer interfaced to an Agilent 1290 HPLC system. The ion source for most analyses was an 73electrospray ionization source (dual-inlet Agilent Jet Stream or “dual AJS”). In some analyses, an Agilent Multimode Ion Source was also used for atmospheric pressure chemical ionization. The parameters used for both ionization sources are outlined in Table 5.

[0285] The HPLC column for all analyses was a 50 mm×2.1 mm Zorbax RRHD Eclipse C18 column with 1.8 μm beads (Agilent, 959757-902). No guard column was used.

[0286] Gradient conditions were isocratic at 95% A from 0 to 0.2 min, with a gradient from 95% A to 5% A from 0.2 to 4.2 minutes, followed by isocratic conditions at 5% A from 4.2 to 5.2 minutes, followed by a gradient from 5% A to 95% A from 5.2 to 5.2 minutes, followed by isocratic re-equilibration at 95% A from 5.2 to 6 minutes. For electrospray analyses, A was 0.1% v/v formic acid in water and B was 0.1% v/v formic acid in acetonitrile. For APCI analyses, B was substituted by 0.1% v/v formic acid in methanol.

[0287] Data analysis by untargeted metabolomics was performed with xcms, using optimal parameters determined by IPO25. For PKS containing clusters, automated analyses were set to generate extracted ion chromatograms (EICs) for the top 50 spectral features as defined by both fold-change and p-value. These EICs were then manually inspected to identify the subset of automatically identified features that appear specific to the expressed BGC as defined by presence in each of three biological replicates of the production strain and absence from three biological replicates of a negative control strain (FIG. 31). EICs of all BGC specific features are illustrated in FIGS. 32-49.

### Example 4: Construction of Yeast Strains

[0288] In the current example, yeast strains are based on the BY4741/BY4742 background, which is in turn based on S288c (C. B. Brachmann, et al., 1998, cited supra). The strains were made in two stages: 1) creation of a core DHY set with restored sporulation and mitochondrial genome stability and 2) creation of JHY derivatives modified for other benefits, which may include protein production. All changes introduced in this study were confirmed by diagnostic PCR and sequencing.

[0289] A sporulation-restored strain set was built by crossing BY4710 (C. B. Brachmann, et al., 1998, cited supra) to a haploid derivative of YAD373 (A. M. Deutschbauer and R. W. Davis, Nat. Genet. 37:133-40, 2005), a BY-based diploid that contains three QTLs that restore sporulation: MKT1(30G), RME1(INS-308A), and TAO3(1493Q). A spore clone from the resulting diploid was repaired for HAP1, which encodes a zinc-finger transcription factor localized to mitochondria and the nucleus. HAP1 is important for mitochondrial genome stability (see J. R. Matoon, E. Caravajal, and D. Gurthrie Curr. Genet. 17:179-83, 1990) and likely also important for sporulation. S288c and derivatives contain a Tyl insertion in the 3′ end of HAP1 that inactivates function. The transposon was excised using the Delitto Perfetto method (F. Storici and M. A. Resnick, Methods Enzymol. 409:329-45, 2006) and confirmed repaired HAPJ function based on transcription of a CYC1p-lacZ reporter (M. Gaisne, et al., Curr. Genet. 36:195-200, 1999). The sporulation-restored, HAP1-repaired strain and its auxotrophic and prototrophic derivatives were then used to create the DHY set of strains that were additionally restored for mitochondrial genome stability.

[0290] The above sporulation-restored strains were used to repair the poor mitochondrial genome stability known to be a problem with S288c and BY derivatives. Mitochondrial genome stability is likely to improve growth and ADH2p-like gene expression under conditions of respiration, and for reducing the frequency of petite cells (slow-growing, respiration-defective cells that cannot grow on non-fermentable carbon sources). For a detailed description of the “mito-repair” method, see construction of JHY650 (J. D. Smith, 2017, cited supra). Briefly, the 50:50 genome editing method was used to introduce the wild-type alleles of three genes shown to be important for mitochondrial genome stability by QTL analysis³¹. The repaired QTLs are: SAL1⁺ (repair of a frameshift), CAT5(91M) and MIP1(661T). Crosses with prototrophic and auxotrophic strains completed the DHY core set of about a dozen sporulation and mitochondrial genome stability restored strains that can be further modified as needed. DHY213 (see Table 3) is one such strain: it contains the seven desired changes described above, is otherwise congenic with BY4741, and was used in this study to create derivatives for the HEx platform (see Table 3).

[0291] Marker-free, seamless deletion of the complete PRB1 and PEP4 ORFs was performed using the 50:50 method (J. Horecka and R. W. Davis, 2014, cited supra). Integration of a 1609 bp ADH2p-npgA-ACS1t expression cassette on the chromosome was performed using a similar method used to integrate DNA segments with the REDI method (J. D. Smith, et al., 2017, cited supra), except that URA3, not FCY1, was used as the counter-selectable marker. For an integration site, an 1166 bp cluster of three transposon LTRs located centromere-distal to YBR209W on chromosome II was replaced (deletion of chrII 643438 to 644603). Two DNA segments were simultaneously inserted via homologous recombination at the integration site that had been cut with SceI to create double strand breaks. One inserted segment was ADH2p-npgA (1448 bp) PCR amplified from a BJ5464/npgA expression strain (npgA from A. nidulans) (K. K. M. Lee, N. A. Da Silva, and J. T. Kealey, Anal. Biochem., 394:75-80, 2009). The npgA 3′ end was repaired to wildtype using a reverse PCR primer that replaced the npgA intron included previously with the wildtype npgA 3′ sequence. To preclude recombination of the expression cassette with the native ADH2 locus, the 161 bp ACS1 terminator was used as the second DNA segment (not ADH2t) and PCR amplified from BY4741. The resulting strain (JHY692) was used in a similar fashion to replace only npgA with the CPR ORF (cytochrome P450 reductase, ATEG_05064 from A. terreus). Finally, a strain with both npgA and CPR expression cassettes (JHY702) was created by mating JHY692 and JHY705.

### Example 5: Determination of Chemical Structures

[0292] For compound isolation, large-scale fermentation was carried out with the strains and clusters of Example 3. The yeast strains were first struck out onto the appropriate SDC dropout agar plates and incubated for 48 hrs at 30° C. A colony was then inoculated into 40 mL SDC dropout medium and incubated at 28° C. for two days with shaking at 250 rpm. This seed culture was used to inoculate 4 L of YPD medium (1.5% Glucose) and cultured for 3 days at 28° C. and 250 rpm. Supernatants were then clarified by centrifugation and extracted with equal volume of ethyl acetate. Cell pellets were extracted with 1 L of acetone. For compounds containing carboxylic acid groups, the pH value of the supernatant was adjusted to 3 by adding HCl prior to extraction. The organic phases were combined and evaporated to dryness. The residue was purified by ISCO-CombiFlash® Rf 200 (Teledyne Isco, Inc) with a gradient of hexane and acetone. After analysis by LC-MS, the fractions containing the target compounds were combined and further purified by semi-preparative HPLC using C18 reverse-phase column. The purity of each compound was confirmed by LC-MS, and the structure was solved by NMR (FIG. 49-59).

[0293] All NMR spectra including ¹H, ³C, COSY, HSQC, HMBC and NOESY spectra were obtained on Bruker AV500 spectrometer with a 5 mm dual cryoprobe at the UCLA Molecular Instrumentation Center. The NMR solvents used for these experiments were purchased from Cambridge Isotope Laboratories, Inc.

TABLE 4
Summary of control and cryptic fungal BGCs examined in this study.

| | | Native Locus | | | | | | |
|---|---|---|---|---|---|---|---|---|
| Cluster ID | Type | Genbank ID | Start | End | Length | Species of origin | Division | Productive? |
| IDT | Ctl | | | | | Aspergillus | Ascomycota | Y |
| | | | | | | tubingensis | | |
| DHZ | Ctl | | | | | Hypomyces | Ascomycota | Y |
| | | | | | | subiculosus | | |
| PKS1 | PKS | KV441552 | 530394 | 546723 | 16329 | Coniothyrium | Ascomycota | Y |
| | | | | | | sporulosum | | |
| PKS2 | PKS | KV441551 | 60641 | 83767 | 23126 | Coniothyrium | Ascomycota | Y |
| | | | | | | sporulosum | | |
| PKS3 | PKS | Deposition | | | 9892 | Acremonium | Ascomycota | N |
| | | pending | | | | Sp. KY4917 | | |
| PKS4 | PKS | AM270992 | 578654 | 603367 | 24713 | Aspergillus | Ascomycota | Y |
| | | | | | | niger | | |
| PKS5 | PKS | CP003009 | 8730831 | 8753560 | 22729 | Thielavia | Ascomycota | N |
| | | | | | | terrestris | | |
| PKS6 | PKS | ABDF02000052 | 9685 | 28459 | 18774 | Trichoderma | Ascomycota | Y |
| | | | | | | virens | | |
| PKS7 | PKS | JPJY01000093 | 2671 | 30026 | 27355 | Pseudogymnoascus | Ascomycota | N |
| | | | | | | pannorum | | |
| PKS8 | PKS | JOWA01000110 | 1607857 | 1643205 | 35348 | Scedosporium | Ascomycota | Y |
| | | | | | | apiospermum | | |
| PKS9 | PKS | KE384750 | 270098 | 292755 | 22657 | Metarhizium | Ascomycota | N |
| | | | | | | anisopliae | | |
| PKS10 | PKS | KB445572 | 91380 | 115199 | 23819 | Cochlioholus | Ascomycota | Y |
| | | | | | | heterostrophus | | |
| PKS11 | PKS | JPKB01001000 | 12749 | 37136 | 24387 | Pseudogymnoascus | Ascomycota | N |
| | | | | | | pannorum | | |
| PKS12 | PKS | JPJU01000852 | 23274 | 38823 | 15549 | Pseudogymnoascus | Ascomycota | N |
| | | | | | | pannorum | | |
| PKS13 | PKS | JPJR01000396 | 848 | 19416 | 18568 | Pseudogymnoascus | Ascomycota | Y |
| | | | | | | pannorum | | |
| PKS14 | PKS | KN847553 | 300827 | 326489 | 25662 | Verruconis | Ascomycota | Y |
| | | | | | | gallopava | | |
| PKS15 | PKS | AWSO01000045 | 179446 | 203577 | 24131 | Moniliophthora | Basidiomycota | Y |
| | | | | | | roreri | | |
| PKS16 | PKS | JH687542 | 431482 | 465332 | 33850 | Punctularia | Basidiomycota | Y |
| | | | | | | strigosozonata | | |
| PKS17 | PKS | KN839868 | 143119 | 188013 | 44894 | Hydnomerulius | Basidiomycota | Y |
| | | | | | | pinastri | | |
| PKS18 | PKS | DS989828 | 1389449 | 1407499 | 18050 | Arthroderma | Ascomycota | Y |
| | | | | | | gypseum | | |
| PKS19 | PKS | KB908593 | 409171 | 443069 | 33898 | Setosphaeria | Ascomycota | N |
| | | | | | | turcica | | |
| PKS20 | PKS | GL532685 | 4724 | 17845 | 13121 | Pyrenophora | Ascomycota | Y |
| | | | | | | teres | | |
| PKS21 | PKS | AMGW01000002 | 1294251 | 1322017 | 27766 | Cladophialophora | Ascomycota | N |
| | | | | | | yegresit | | |
| PKS22 | PKS | DF933843 | 225991 | 254307 | 28316 | Talaromyces | Ascomycota | Y |
| | | | | | | cellulolyticus | | |
| PKS23 | PKS | KE720645 | 48853 | 80314 | 31461 | Endocarpon | Ascomycota | Y |
| | | | | | | pusilium | | |
| PKS24 | PKS | DF933834 | 523551 | 558018 | 34467 | Talaromyces | Ascomycota | Y |
| | | | | | | cellulolyticus | | |
| PKS25 | PKS | AWSO01000633 | 5071 | 30440 | 25369 | Moniliophthora | Basidiomycota | N |
| | | | | | | roreri | | |
| PKS26 | PKS | KN817529 | 130968 | 152240 | 21272 | Hypholoma | Basidiomycota | N |
| | | | | | | sublateritium | | |
| PKS27 | PKS | KB445800 | 1362248 | 1403385 | 41137 | Ceriporiopsis | Basidiomycota | N |
| | | | | | | subvermispora | | |
| PKS28 | PKS | AWSO01000632 | 8804 | 37857 | 29053 | Moniliophthora | Basidiomycota | Y |
| | | | | | | roreri | | |
| TC1 | UTC | ABDF02000086 | 384012 | 368868 | 15144 | Trichoderma | Ascomycota | Y |
| | | | | | | Virens | | |
| TC2 | UTC | ABDF02000083 | 37740 | 49247 | 11507 | Trichoderma | Ascomycota | N |
| | | | | | | Virens | | |
| TC3 | UTC | FQ790293 | 97750 | 131296 | 33546 | Botryotonia | Ascomycota | Y |
| | | | | | | cinerea | | |
| TC4 | UTC | JH717969 | 858521 | 869226 | 10705 | Formitiporia | Basidiomycota | Y |
| | | | | | | mediterranea | | |
| TC5 | UTC | KI925459 | 2412992 | 2432365 | 19373 | Heterobasidion | Basidiomycota | Y |
| | | | | | | annosum | | |
| TC6 | UTC | KB445798 | 581049 | 618823 | 37774 | Ge/atoporia | Basidiomycota | N |
| | | | | | | subvermispora | | |
| TC7 | UTC | JH719450 | 83620 | 114270 | 30650 | Dichomitus | Basidiomycota | N |
| | | | | | | squalens | | |
| TC8 | UTC | KU198014 | 1718438 | 1746540 | 28102 | Pleurotus | Basidiomycota | N |
| | | | | | | ostreatus | | |
| TC9 | UTC | GL377319 | 205808 | 212935 | 7127 | Schizophyllum | Basidiomycota | Y |
| | | | | | | commune | | |
| TC10 | UTC | JH687394 | 99692 | 114281 | 14589 | Stereum | Basidiomycota | N |
| | | | | | | hirsutum | | |
| TC11 | UTC | JH687396 | 33983 | 48346 | 14363 | Sternum | Basidiomycota | N |
| | | | | | | hirsutum | | |
| TC12 | UTC | JH719415 | 280135 | 300470 | 20335 | Dichomitus | Basidiomycota | N |
| | | | | | | squalens | | |
| TC13 | UTC | JH795868 | 73132 | 97338 | 24206 | Dacryopinax | Basidiomycota | N |
| | | | | | | primogenitus | | |
| | | | | | | | Total | 43 |
| | | | | | | | Productive | 24 |

TABLE 5
Ion source parameters used in this study

| | | |
|---|---|---|
| Ion source parameter | Dual AJS | MMI |

| | | | | |
|---|---|---|---|---|
| gas temperature | 250° | C. | 350° | C. |
| drying gas | 12 | L/min | 7.5 | L/min |
| nebulizer | 10 | psig | 20 | psig |

| | | | |
|---|---|---|---|
| sheath gas temp. | 400° | C. | — |
| sheath gas flow | 12 | L/min | — |

| | | | |
|---|---|---|---|
| vaporizer | — | 250° | C. |

| | | | | |
|---|---|---|---|---|
| capillary voltage | 3500 | V | 1500 | V |
| (Vcap) | | | | |

| | | | |
|---|---|---|---|
| nozzle voltage | 1400 | V | — |

| | | | |
|---|---|---|---|
| corona discharge | — | 4 | μA |

| | | | | |
|---|---|---|---|---|
| fragmentor | 100 | V | 120 | V |
| skimmer | 50 | V | 50 | V |
| octopole 1 RF Vpp | 750 | V | 750 | V |

| | | | |
|---|---|---|---|
| charging voltage | — | 1000 | V |

TABLE 6
Description of promoter sequences

| SEQ ID NO. | Description |
|---|---|
| 1 | S. cerevisiae pADH2 |
| 2 | S. cerevisiae pPCK1 |
| 3 | S. cerevisiae pMLS1 |
| 4 | S. cerevisiae pICL1 |
| 5 | S. cerevisiae pYLR307C-A |
| 6 | S. cerevisiae pYGR067C |
| 7 | S. cerevisiae pIDP2 |
| 8 | S. cerevisiae pADY2 |
| 9 | S. cerevisiae pGAC1 |
| 10 | S. cerevisiae pECM13 |
| 11 | S. cerevisiae pFAT3 |
| 12 | S. cerevisiae pPUT1 |
| 13 | S. cerevisiae pNQM1 |
| 14 | S. cerevisiae pSFC1 |
| 15 | S. cerevisiae pJEN1 |
| 16 | S. cerevisiae pSIP18 |
| 17 | S. cerevisiae pAT02 |
| 18 | S. cerevisiae pYIG1 |
| 19 | S. cerevisiae pFBP1 |
| 20 | S. cerevisiae PHO89 |
| 21 | S. cerevisiae CAT2 |
| 22 | S. cerevisiae CTA1 |
| 23 | S. cerevisiae ICL2 |
| 24 | S. cerevisiae ACS1 |
| 25 | S. cerevisiae PDH1 |
| 26 | S. cerevisiae REG2 |
| 27 | S. cerevisiae CIT3 |
| 28 | S. cerevisiae CFRC1 |
| 29 | S. cerevisiae RGI2 |
| 30 | S. cerevisiae PUT4 |
| 31 | S. cerevisiae NCA3 |
| 32 | S. cerevisiae STL1 |
| 33 | S. cerevisiae ALP1 |
| 34 | S. cerevisiae NDE2 |
| 35 | S. cerevisiae QNQ1 |
| 36 | S. paradoxus pADH2 |
| 37 | S. kudriavzevii pADH2 |
| 38 | S. bayanus pADH2 |
| 39 | S. mikitae pADH2 |
| 40 | S. castellii pADH2 |
| 41 | S. paradoxus pPCK1 |
| 42 | S. kudriavzevii pPCK1 |
| 43 | S. bayanus pPCK1 |
| 44 | S. paradoxus pMLS1 |
| 45 | S. kudriavzevii pMLS1 |
| 46 | S. bayanus pMLS1 |
| 47 | S. paradoxus pICL1 |
| 48 | S. kudriavzevii pICL1 |
| 49 | S. bayanus pICL1 |
| 50 | S. cerevisiae pTDH3 |
| 51 | S. cerevisiae pTEF1 |
| 52 | S. cerevisiae pFBA1 |
| 53 | S. cerevisiae pPDC1 |
| 54 | S. cerevisiae pTPI1 |
| 55 | S. cerevisiae tADH2 |
| 56 | S. cerevisiae tPGI1 |
| 57 | S. cerevisiae tENO2 |
| 58 | S. cerevisiae tTEF1 |
| 59 | A. tubingensis GGPPS |
| 60 | A. tubingensis PT |
| 61 | A. tubingensis FMO |
| 62 | A. tubingensis Cyc |
| 63 | H. subiculosis hpm8 |
| 64 | H. subiculosis hpm3 |
| 65 | pCHIDT-2.1 |
| 66 | pCHIDT-2c |

TABLE 7
Description of gene sequences

| Cluster ID NO. | SEQ ID NO. | Description |
|---|---|---|
| AFU3G | 67 | AFOC1 |
| | 68 | AFOC9 |
| | 69 | AFOC6 |
| | 70 | AFOC5 |
| | 71 | AFOC8 |
| | 72 | AFOC4 |
| | 73 | AFOC7 |
| | 74 | AFOC5N |
| | 75 | AFOC2_PKS |
| | 76 | AFOC3 |
| Afu1g17740 | 77 | A1OC1_TF |
| | 78 | A1OC2_serine_hydrolase |
| | 79 | A1OC3_aldose_epimerase |
| | 80 | A1OC4_P450 |
| | 81 | Afu1g17740_2_PKS |
| Ca157 | 82 | Ca157_1_SDR |
| | 83 | Ca157_2_Acyl_CoA_oxidase |
| | 84 | Ca157_3_P450 |
| | 85 | Ca157_4_FMO |
| | 86 | Ca157_5_PKS |
| | 87 | Ca157_6_transferase |
| | 88 | Ca157_7_PfpI |
| | 89 | Ca157_8_hyp |
| | 90 | Ca157_9_AB_hydrolase |
| | 91 | Ca157_10_hyp |
| Ca2032 | 92 | Ca2032_1_3_GHMP_kinase |
| | 93 | Ca2032_1_PKS |
| | 94 | Ca2032_3_MT |
| | 95 | Ca2032_4_P450 |
| | 96 | Ca2032_5_Ca_uniporter |
| | 97 | Ca2032_6_GNAT_acetyltransferase |
| KU14 | 98 | KU14_SC3_4774_Cyclase |
| | 99 | KU14_SC3_4776_P450 |
| | 100 | KU14_SC3_4773_polyprenyl_synthetase |
| | 101 | KU14_SC3_4771_AK_reductase |
| | 102 | KU14_SC3_4770_polyprenyl_synthetase |
| | 103 | KU14_SC3_4768_AK_reductase |
| | 104 | KU14_SC3_4772_DNA_repair |
| | 105 | KU14_SC3_47775_QacA_drug_transporter |
| | 106 | KU14_SC3_4769_Hyp |
| KU18 | 107 | KU18_SH9_7287_Cyclase |
| | 108 | KU18_SH9_7288_P450 |
| | 109 | KU18_SH9_7289_P450 |
| | 110 | KU18_SH9_7286_P450 |
| | 111 | KU18_SH9_7285_DH |
| KU26 | 112 | KU26_ETS81063.1_metallo_hydrolase |
| | 113 | KU26_ETS81064.1_hyp |
| | 114 | KU26_ETS81065.1_esterase |
| | 115 | KU26_ETS81066.1_PKS |
| | 116 | KU26_ETS81067.1_hyp |
| | 117 | KU26_ETS81068.1_SDR |
| | 118 | KU26_ETS81069.1_SDR |
| KU29 | 119 | KU29_BO23_6166_ADH |
| | 120 | KU29_BO23_6167_aminotransferase_3 |
| | 121 | KU29_BO23_6168_fasciclin |
| | 122 | KU29_BO23_6169_hyp |
| | 123 | KU29_BO23_6170_esterase |
| | 124 | KU29_BO23_6171_glycoside_hydrolase |
| | 125 | KU29_BO23_6172_hyp |
| | 126 | KU29_BO23_6173_P450 |
| | 127 | KU29_BO23_6174_PKS |
| KU40 | 128 | KU40_KFA56048.1_NmrA_like |
| | 129 | KU40_KFA56160.1_hyp |
| | 130 | KU40_KFA56046.1_phytanoly-CoA_dioxygenase |
| | 131 | KU40_KFA56190.1_NmrA_like |
| | 132 | KU40_KFA56035.1_PKS |
| | 133 | KU40_KFA56227.1_hyp |
| | 134 | KU40_KFA56040.1_hyp |
| | 135 | KU40_KFA56229.1_alkaline_serine_protease |
| KU41 | 136 | KU41_KIL85236.1_phenylalanine_specific_permease |
| | 137 | KU41_KIL85237.1_aldehyde_DH |
| | 138 | KU41_KIL85238.1_DH |
| | 139 | KU41_KIL85239.1_hyp |
| | 140 | KU41_KIL85240.1_hyp |
| | 141 | KU41_KIL85241.1_hyp |
| | 142 | KU41_KIL85242.1_1-amino_cyclopropane-1-carboxylate_oxidase |
| | 143 | KU41_KIL85243.1_hyp |
| | 144 | KU41_KIL85244.1_PKS |
| | 145 | KU41_KIL85245.1_hyp |
| | 146 | KU41_KIL85246.1_aromatic_dioxygenase |
| | 147 | KU41_KIL85247.1_peptidase |
| | 148 | KU41_KIL85248.1_kinase |
| | 149 | KU41_KIL85249.1_metalloprotease |
| | 150 | KU41_KIL85250.1_BLA |
| | 151 | KU41_KIL85251.1_SDR |
| | 152 | KU41_KIL85252.1_AK_reductase |
| | 153 | KU41_KIL85253.1_metallopeptidase |
| KU44 | 154 | KU44_SL06_4460_TPR_repeat |
| | 155 | KU44_SL06_4461_PKS |
| | 156 | KU44_SL06_4462_aminotransferase_V |
| | 157 | KU44_SL06_4463_MFS_transporter |
| PKS1 | 158 | CS100GC1_CDS1_PKS |
| | 159 | CS100GC1_CDS2_serine_hydrolase |
| | 160 | CS100GC1_CDS3_p450 |
| | 161 | CS100GC1_CDS4_short_chain_dehydrogenase |
| | 162 | CS100GC1_CDS5_FAD_dehydrogenase |
| PKS10 | 163 | KU34_CH10_1770_epimerase_DH |
| | 164 | KU34_CH10_1802_P450 |
| | 165 | KU34_CH10_1821_PKS |
| | 166 | KU34_CH10_1888_metallo_bla |
| | 167 | KU34_CH10_1909_hyp |
| | 168 | KU34_CH10_1922_DUF1772 |
| | 169 | KU34_CH10_1937_NTF2_like |
| | 170 | KU34_CH10_1951_NmrA_like |
| | 171 | KU34_CH10_1975_SDR |
| | 172 | KU34_CH10_2002_ABC_transporter |
| PKS11 | 173 | KU35_KFY73936.1_SDR |
| | 174 | KU35_KFY73937.1_DUF_3425 |
| | 175 | KU35_KFY73938.1_Zn_finger |
| | 176 | KU35_KFY73939.1_OMT |
| | 177 | KU35_KFY73940.1_metallo_lactamase |
| | 178 | KU35_KFY73941.1_PKS |
| | 179 | KU35_KFY73942.1_acetyl_transferase |
| | 180 | KU35_KFY73943.1_NmrA_like |
| | 181 | KU35_KFY73944.1_FAD_linked_oxygenase |
| PKS12 | 182 | KU36_KFY14209.1_hyp |
| | 183 | KU36_KFY14210.1_OMT |
| | 184 | KU36_KFY14211.1_Metallo_BLA |
| | 185 | KU36_KFY14212.1_PKS |
| | 186 | KU36_KFY14213.1_FAD_linked_oxidase |
| PKS13 | 187 | KU37_KFY01907.1_DH |
| | 188 | KU37_KFY01908.1_ABC_tranporter |
| | 189 | KU37_KFY01909.1_PKS |
| | 190 | KU37_KFY01910.1_MFS |
| | 191 | KU37_KFY01911.1_PKc_like |
| PKS14 | 192 | KU38_KIW01747.1_metallo_hydrolase |
| | 193 | KU38_KIW01748.1_halogenase |
| | 194 | KU38_KIW01749.1_P450 |
| | 195 | KU38_KIW01750.1_cupin_like |
| | 196 | KU38_KIW01751.1_OMT |
| | 197 | KU38_KIW01752.1_MHR_TF |
| | 198 | KU38_KIW01753.1_monoxygenase |
| | 199 | KU38_KIW01754.1_PKS |
| PKS15 | 200 | KU39_ESK96608.1_monocarboxylate_permease |
| | 201 | KU39_ESK96609.1_NAD_epimerase_DH |
| | 202 | KU39_ESK96610.1_hyp |
| | 203 | KU39_ESK96611.1_carbonylreductase |
| | 204 | KU39_ESK96612.1_phenol_2_monoxygenase |
| | 205 | KU39_ESK96613.1_PKS |
| | 206 | KU39_ESK96614.1_SDR |
| PKS16 | 207 | NW_006767437_—_cystathionine_beta-synthase_CDS |
| | 208 | NW_006767437_—_hypothetical_protein_1_CDS |
| | 209 | NW_006767437_—_hypothetical_protein_2_CDS |
| | 210 | NW_006767437_—_hypothetical_protein_3_CDS |
| | 211 | NW_006767437_—_Pkinase-domain-containing_protein_CDS |
| PKS17 | 212 | KU43_KIJ60838.1 |
| | 213 | KU43_KIJ60843.1_P450 |
| | 214 | KU43_KIJ60845.1 |
| | 215 | KU43_KIJ60839.1_isoprenylcysteine_carboxyl_methyltransferase |
| | 216 | KU43_KIJ60847.1_isoprenylcysteine_carboxyl_methyltransferase |
| | 217 | KU43_KIJ60848.1_ABC_transporter |
| | 218 | KU43_KIJ60844.1 |
| | 219 | KU43_KIJ60846.1_P450 |
| | 220 | KU43_KIJ60842.1 |
| | 221 | KU43_KIJ60840.1_ABC_transporter |
| | 222 | KU43_KIJ60837.1_P450 |
| | 223 | KU43_KIJ60841.1_P450 |
| | 224 | KU43_KIJ60886.1_PKS |
| PKS18 | 225 | SU62_EFR04826.1_hypothetical_protein |
| | 226 | SU62_EFR04827.1_fatty-acid-CoA_ligase |
| | 227 | SU62_EFR04828.1_pks |
| | 228 | SU62_EFR04829.1_esterase |
| PKS19 | 229 | SU64_EOA86426.1_YfhR_like |
| | 230 | SU64_EOA86427.1_ER |
| | 231 | SU64_EOA86425.1_FAD-hydroxylase |
| | 232 | SU64_EOA86421.1_Drug_resistance_transporter |
| | 233 | SU64_EOA86423.1_OMT |
| | 234 | SU64_EOA86422.1_pks |
| | 235 | SU64_EOA86424.1_esterase |
| PKS2 | 236 | CS163GC1_CDS1_serine_hydrolase |
| | 237 | CS163GC1_CDS2_p450 |
| | 238 | CS163GC1_CDS3_PKS |
| | 239 | CS163GC1_CDS4_short_chain_dehydrogenase |
| | 240 | CS163GC1_CDS_FAD_dehydrogenase |
| PKS20 | 241 | SU65_EFQ95559.1_BLA |
| | 242 | SU65_EFQ95560.1_PKS |
| | 243 | SU65_EFQ95561.1_hyp |
| | 244 | SU65_EFQ95562.1_KR |
| PKS21 | 245 | SU67_EXJ61964.1_drug_resistance_transporter |
| | 246 | SU67_EXJ61965.1_scytalone_dehydratase |
| | 247 | SU67_EXJ61966.1_versicolorin_reductase |
| | 248 | SU67_EXJ61967.1_AMP_ligase |
| | 249 | SU67_EXJ61968.1_hypothetical_protein |
| | 250 | SU67_EXJ61969.1_FAD_monooxygenase |
| | 251 | SU67_EXJ61970.1_pks |
| | 252 | SU67_EXJ61971.1_metallo_BLA |
| | 253 | SU67_EXJ61972.1_hyp |
| | 254 | SU67_EXJ61973.1_SDR |
| | 255 | SU67_EXJ61974.1_AifR_reg |
| PKS22 | 256 | SU68_GAM43180.1_beta-lactamase_family_protein |
| | 257 | SU68_GAM43181.1_NAD-dependent_epimerase_dehydratase |
| | 258 | SU68_GAM43183.1_oxidoreductase |
| | 259 | SU68_GAM43185.1_benzoate_4-monooxygenase_cytochrome_P450 |
| | 260 | SU68_GAM43187.1_scytalone_dehydratase |
| | 261 | SU68_GAM43176.1_riboflavin_biosynthesis_protein |
| | 262 | SU68_GAM43177.1_sugar_transport_protein |
| | 263 | SU68_GAM43178.1_short-chain_dehydrogenase |
| | 264 | SU68_GAM43179.1_pks |
| | 265 | SU68_GAM43182.1_halogenase |
| | 266 | SU68_GAM43184.1_NAD-dependent_epimerase_dehydratase |
| | 267 | SU68_GAM43186.1_SDR |
| PKS23 | 268 | SU70_ERF77218.1_SDR |
| | 269 | SU70_ERF77219.1_Fungal_TF |
| | 270 | SU70_ERF77220.1_p450 |
| | 271 | SU70_ERF77221.1_pks |
| | 272 | SU70_ERF77222.1_DABB_superfamily |
| | 273 | SU70_ERF77223.1_FAD_monooxygenase |
| | 274 | SU70_ERF77224.1_alcohol_DH |
| | 275 | SU70_ERF77225.1_OMT |
| | 276 | SU70_ERF77226.1_alcohol_DH |
| PKS24 | 277 | SU71_GAM40295.1_sulfhydrolase |
| | 278 | SU71_GAM40298.1_AMP_ligase |
| | 279 | SU71_GAM40299.1_MT |
| | 280 | SU71_GAM40301.1_carnosine_synthase |
| | 281 | SU71_GAM40303.1_carnitine_acetyl-CoA_transferase |
| | 282 | SU71_GAM40296.1_aminotransferase |
| | 283 | SU71_GAM40297.1_ammonia_lyase |
| | 284 | SU71_GAM40300.1_pks |
| | 285 | SU71_GAM40302.1_ABC_tranporter |
| PKS25 | 286 | SU72_ESK88623.1_pks |
| | 287 | SU72_ESK88624.1_carotenoid_cleavage_dioxygenase_1 |
| | 288 | SU72_ESK88625.1_long-chain-fatty-acid-ligase |
| | 289 | SU72_ESK88626.1_amino_acid_permease |
| PKS26 | 290 | SU73_KN817529.1_pks |
| | 291 | SU73_KN817529.1_hyp |
| | 292 | SU73_KN817529.1_AMP_ligase |
| | 293 | SU73_KN817529.1_8_amino_7_oxanoate_synthase |
| PKS27 | 294 | SU74_EMD35673.1_NAD_DH |
| | 295 | SU74_EMD35676.1_sulfhydrylase |
| | 296 | SU74_EMD35664.1_hyp |
| | 297 | SU74_EMD35669.1_halogenase |
| | 298 | SU74_EMD35663.1_AB_hydrolase |
| | 299 | SU74_EMD35666.1_alcohol_DH |
| | 300 | SU74_EMD35667.1_Drug_resistance_transporter |
| | 301 | SU74_EMD35668.1_hyp |
| | 302 | SU74_EMD35670.1_P450 |
| | 303 | SU74_EMD35665.1_hyp |
| | 304 | SU74_EMD35671.1_pks |
| | 305 | SU74_EMD35672.1_hyp |
| | 306 | SU74_EMD35674.1_hyp |
| | 307 | SU74_EMD35675.1_hyp |
| PKS28 | 308 | SU75_ESK88629.1_pks |
| | 309 | SU75_ESK88630.1_drug_resistance_subfamily |
| | 310 | SU75_ESK88631.1_hypothetical_protein |
| | 311 | SU75_ESK88632.1_dead-box_protein_abstrakt |
| | 312 | SU75_ESK88633.1_hyp |
| | 313 | SU75_ESK88634.1_nadh-ubiquinone_oxidoreductase |
| PKS3 | 314 | AK_C24701GC76_CDS1_class_II_aminotransferase |
| | 315 | AK_C24701GC76_CDS2_p450 |
| | 316 | AK_C24701GC76_CDS3_PKS |
| | 317 | AK_C24701GC76_CDS4_ferric_chelate_reductase |
| | 318 | AK_C24701GC76_CDS5_DUF4243 |
| PKS4 | 319 | KU27_AN22_1464_esterase |
| | 320 | KU27_AN22_1465_PKS |
| | 321 | KU27_AN22_1466_hyp |
| | 322 | KU27_AN22_1467_A_TD |
| | 323 | KU27_AN22_1468_hyp |
| | 324 | KU27_AN22_1469_amino_oxidase |
| PKS5 | 325 | KU28_TT08_2721_AK_reductase |
| | 326 | KU28_TT08_2722_ABC_transporter |
| | 327 | KU28_TT08_2723_esterase |
| | 328 | KU28_TT08_2724_PKS |
| | 329 | KU28_TT08_2725_sugar_transport |
| PKS6 | 330 | KU30_TV43_5580_esterase |
| | 331 | KU30_TV43_5581_P450 |
| | 332 | KU30_TV43_5582_PKS |
| | 333 | KU30_TV43_5583_OMT |
| | 334 | KU30_TV43_5584_P450 |
| PKS7 | 335 | KU31_KFY69032.1_P450 |
| | 336 | KU31_KFY69033.1_hyp |
| | 337 | KU31_KFY69034.1_esterase |
| | 338 | KU31_KFY69035.1_P450 |
| | 339 | KU31_KFY69036.1_PKS |
| | 340 | KU31_KFY69037.1_glycoside_hydrolase |
| | 341 | KU31_KFY69038.1_thymine_dioxygenase |
| PKS8 | 342 | KU32_KEZ41287.1_nucleotidyltransferase |
| | 343 | KU32_KEZ41288.1_OMT |
| | 344 | KU32_KEZ41289.1_AB_hydrolase |
| | 345 | KU32_KEZ41290.1_mito_phos_carrier |
| | 346 | KU32_KEZ41291.1_hyp |
| | 347 | KU32_KEZ41292.1_crotonyl_CoA_reductase |
| | 348 | KU32_KEZ41293.1_PKS |
| | 349 | KU32_KEZ41294.1_Drug_resistance_transporter |
| | 350 | KU32_KEZ41295.1_NADB_monoxygenase |
| PKS9 | 351 | KU33_KJK75348.1_alkaline_serine_hydrolase |
| | 352 | KU33_KJK75349.1_LysM_containing_protein |
| | 353 | KU33_KJK75350.1_PKS |
| | 354 | KU33_KJK75351.1_drug_resistance_transporter |
| | 355 | KU33_KJK75352.1_phytanoyl_CoA_dioxygenase |
| | 356 | KU33_KJK75353.1_SDR |
| | 357 | KU33_KJK75354.1_amino-7_oxonolate_synthase |
| SU61 | 358 | SU61_ENH82084.1_choline_oxidase |
| | 359 | SU61_ENH82085.1_fungal_specific_transcription_factor |
| | 360 | SU61_ENH82086.1_short-chain_dehydrogenase |
| | 361 | SU61_ENH82087.1_hypothetical_protein |
| | 362 | SU61_ENH82088.1_hypothetical_protein |
| | 363 | SU61_ENH82089.1_pks |
| | 364 | SU61_ENH82090.1_esterase |
| | 365 | SU61_ENH82091.1_ABC_multidrug_transporter_mdr1 |
| | 366 | SU61_ENH82092.1_cytochrome_b5_type_b |
| | 367 | SU61_ENH82093.1_sulfite_reductase_subunit_alpha |
| SU63 | 368 | SU63_KJZ74253.1_hyp_signalling_protein |
| | 369 | SU63_KJZ74254.1_mtRNA_formyl_transferase |
| | 370 | SU63_KJZ74255.1_esterase |
| | 371 | SU63_KJZ74256.1_PKS |
| | 372 | SU63_KJZ74257.1_choline_DH_halogenase |
| SU66 | 373 | SU66_EMF17384.1_ras-domain-containing_protein |
| | 374 | SU66_EMF17385.1_phosphoinositide_phosphatase |
| | 375 | SU66_EMF17387.1_hypothetical_protein |
| | 376 | SU66_EMF17389.1_versicolorin_reductase |
| | 377 | SU66_EMF17390.1_scytalone_dehydratase |
| | 378 | SU66_EMF17386.1_pks |
| | 379 | SU66_EMF17388.1_Metallo-hydrolase_oxidoreductase |
| | 380 | SU66_EMF17391.1_StcQ-like_protein |
| SU69 | 381 | SU69_KFY04761.1_aldehyde_oxidase |
| | 382 | SU69_KFY04762.1_SDR |
| | 383 | SU69_KFY04763.1_hyp |
| | 384 | SU69_KFY04764.1_reg_protein |
| | 385 | SU69_KFY04765.1_OMT |
| | 386 | SU69_KFY04766.1_metallo_BLA |
| | 387 | SU69_KFY04767.1_pks |
| | 388 | SU69_KFY04768.1_FAD-linked_oxidase |
| TC1 | 389 | Tv86_130_CDS |
| | 390 | Tv86_132_CDS |
| | 391 | Tv86_133_CDS |
| | 392 | Tv86_134_CDS |
| | 393 | Tv86_135_ORF |
| | 394 | Tv86_136_CDS |
| | 395 | Tv86_137_CDS |
| TC10 | 396 | KU19_SH16_10821_Cyclase |
| | 397 | KU19_SH16_10820_P450 |
| | 398 | KU19_SH16_10822_P450 |
| | 399 | KU19_SH16_10823_AK_reductase |
| | 400 | KU19_SH16_10819_QacA_MFS |
| TC11 | 401 | KU_20_SH18_11663_Cyclase |
| | 402 | KU_20_SH18_11664_P450 |
| | 403 | KU_20_SH18_11665_P450 |
| | 404 | KU_20_SH18_11662_P450 |
| | 405 | KU_20_SH18_11660_NMT |
| | 406 | KU_20_SH18_11661_MFS |
| TC12 | 407 | KU21_DS19_7112_Cyclase |
| | 408 | KU21_DS19_7113_P450 |
| | 409 | KU21_DS19_7108_P450 |
| | 410 | KU21_DS19_7109_MT |
| | 411 | KU21_DS19_7111_GMC_oxido |
| | 412 | KU21_DS19_7114_AK_reductase |
| | 413 | KU21_DS19_7110_Hyp |
| TC13 | 414 | KU22_DDJM14_6568_Cyclase |
| | 415 | KU22_DDJM14_6570_P450 |
| | 416 | KU22_DDJM14_6567_OMT |
| | 417 | KU22_DDJM14_6565_MT |
| | 418 | KU22_DDJM14_6564_MT |
| | 419 | KU22_DDJM14_6562_P450 |
| | 420 | KU22_DDJM14_6563_MT |
| | 421 | KU22_DDJM14_6561_GST |
| | 422 | KU22_DDJM14_6569_V-type_ATPase |
| | 423 | KU22_DDJM14_6566_TF |
| TC2 | 424 | Tv83_13_CDS |
| | 425 | Tv83_14_CDS |
| | 426 | Tv83_15_CDS |
| | 427 | Tv83_16_CDS |
| TC3 | 428 | BFT4_1_FAD_binding_domain_protein |
| | 429 | BFT4_2_Aldo_keto_reductase_oxidoreductase |
| | 430 | BFT4_3_cytochrome_P450 |
| | 431 | BFT4_4_UbiA_cyclase |
| | 432 | BFT4_6_hyp_protein_4 |
| | 433 | BFT4_7_hyp_protein_5 |
| | 434 | BFT4_8_hyp_protein_6 |
| | 435 | BFT4_10_FAD_FMN_isoamyl_alcohol_oxidase |
| | 436 | BFT4_11_hyp_protein_8 |
| | 437 | BFT4_14_hyp_protein_11 |
| | 438 | BFT4_15_glutathione_S_transferase |
| | 439 | BFT4_16_D_isomer_specific_2_hydroxyacid_dehydrogenase |
| TC4 | 440 | KU11_FM3_3034_Cyclase |
| | 441 | KU11_FM3_3033_P450 |
| | 442 | KU11_FM3_3032_P450 |
| | 443 | KU11_FM3_3031_FAD |
| | 444 | KU11_FM3_3037_Hydrox |
| | 445 | KU11_FM3_3027_AMP_SDR |
| | 446 | KU11_FM3_3030_PHOS |
| | 447 | KU11_FM3_3035_Hyp |
| TC5 | 448 | KU12_HI6_11661_Cyclase |
| | 449 | KU12_HI6_11655_P450 |
| | 450 | KU12_HI6_11638_P450 |
| | 451 | KU12_HI6_11667_AMP_ligase |
| | 452 | KU12_HI6_11646_monocarbox_MFS |
| | 453 | KU12_HI6_11632_MFS |
| TC6 | 454 | KU13_CeS8_5906_Cyclase |
| | 455 | KU13_CeS8_5905_P450 |
| | 456 | KU13_CeS8_5911_P450 |
| | 457 | KU13_CeS8_5904_choline_DH |
| | 458 | KU13_CeS8_5910_halogenase |
| | 459 | KU13_CeS8_5907_AMP_ligase |
| | 460 | KU13_CeS8_5909_superoxide_dismutase |
| | 461 | KU13_CeS8_5908_MFS |
| | 462 | KU13_CeS8_5912_MFS |
| TC7 | 463 | KU15_DS54_10337_Cyclase |
| | 464 | KU15_DS54_10336_P450 |
| | 465 | KU15_DS54_10340_P450 |
| | 466 | KU15_DS54_10341_P450 |
| | 467 | KU15_DS54_10338_polyprenyl_synthetase |
| | 468 | KU15_DS54_10333_GMC_oxido |
| | 469 | KU15_DS54_10334_GMC_oxido |
| | 470 | KU15_DS54_10339_Hyp |
| | 471 | KU15_DS54_10335_Hyp_transmembrane |
| TC8 | 472 | KU16_PO11_11845_Cyclase |
| | 473 | KU16_PO11_11844_FAD_oxidase |
| | 474 | KU16_PO11_11843_P450 |
| | 475 | KU16_PO11_11841_2_P450 |
| | 476 | KU16_PO11_11840_FAD_oxidase |
| | 477 | KU16_PO11_11847_FAD_oxidase |
| | 478 | KU16_PO11_11846_SDR |
| | 479 | KU16_PO11_11848_AMP_ligase |
| | 480 | KU16_PO11_11839_AMP_ligase |
| TC9 | 481 | KU17_SC18_16687_Cyclase |
| | 482 | KU17_SC18_16686_P450 |
| | 483 | KU17_SC18_16688_SDR |

[0294] While preferred embodiments of the present disclosure have been shown and described herein, those skilled in the art will understand that such embodiments are provided by way of example only. Numerous variations, changes, and substitutions will now occur to those skilled in the art without departing from the disclosure.

The application's sequence listing, which the Patent Office published only in electronic form, follows.

SEQUENCE LISTING (483 sequences)

SEQ ID NO: 1 - DNA, 500 bp, Saccharomyces cerevisiae
tatctaaaaattgccttatgatccgtctctccggttacagcctgtgtaactgattaatcctgcctttctaatcaccattctaatgttttaattaagggattttgtcttcattaacggctttcgctcataaaaatgttatgacgttttgcccgcaggcgggaaaccatccacttcacgagactgatctcctctgccggaacaccgggcatctccaacttataagttggagaaataagagaatttcagattgagagaatgaaaaaaaaaaaaaaaaaaaaggcagaggagagcatagaaatggggttcactttttggtaaagctatagcatgcctatcacatataaatagagtgccagtagcgacttttttcacactcgaaatactcttactactgctctcttgttgtttttatcacttcttgtttcttcttggtaaatagaatatcaagctacaaaaagcatacaatcaactatcaactattaactatatcgtaatacaca

SEQ ID NO: 2 - DNA, 500 bp, Saccharomyces cerevisiae
ataggaaaaaaccgagcttcctttcatccggcgcggctgtgttctacatatcactgaagctccgggtattttaagttatacaagggaaagatgccggctagactagcaagttttaggctgcttaacattatggataggcggataaagggcccaaacaggattgtaaagcttagacgcttctggttggacaatggtacgtttgtgtattaagtaaggcttggctggggatagcaacattgggcagagtatagaagaccacaaaaaaaaggtatataagggcagagaagtctttgtaatgtgtgtaacttctcttccatgtgtaatcagtatttctacttacttcttaaatatacagaagtaagacagataaccaacagcctttcccagatatacatatatatctttatttcagcttaaacaataattatatttgtttaactcaaaaataaaaaaaaaaaaccaaactcacgcaactaattattccataataaaataacaac

SEQ ID NO: 3 - DNA, 500 bp, Saccharomyces cerevisiae
ccattgggccgatgaagttagtcgacggatagaagcggttgtcccctttcccggcgagccggcagtcgggccgaggttcggataaattttgtattgtgttttgattctgtcatgagtattacttatgttctctttaggtaaccccaggttaatcaatcacagtttcataccggctagtattcaaattatgacttttcttctgcagtgtcagccttacgacgattatctatgagctttgaatatagtttgccgtgattcgtatctttaattggataataaaatgcgaaggatcgatgacccttattattatttttctacactggctaccgatttaactcatcttcttgaaagtatataagtaacagtaaaatataccgtacttctgctaatgttatttgtcccttatttttcttttcttgtcttatgctatagtacctaagaataacgactattgttttgaactaaacaaagtagtaaaagcacataaaagaattaagaaa

SEQ ID NO: 4 - DNA, 500 bp, Saccharomyces cerevisiae
atttattgaaaagtaaatatctcgtaacccggatgctttgggcggtcgggttttgctactcgtcatccgatgagaaaaactgttcccttttgccccaggtttccattcatccgagcgatcacttatctgacttcgtcactttttcatttcatccgaaacaatcaaaactgaagccaatcaccacaaaattaacactcaacgtcatctttcactaccctttacagaagaaaatatccatagtccggactagcatcccagtatgtgactcaatattggtgcaaaagagaaaagcataagtcagtccaaagtccgcccttaaccaggcacatcggaattcacaaaacgtttctttattatataaaggagctgcttcactggcaaaattcttattatttgtcttggcttgctaatttcatcttatcctttttttcttttcacacccaaatacctaacaattgagagaaaactcttagcataacataacaaaaagtcaacgaaaa

SEQ ID NO: 5 - DNA, 500 bp, Saccharomyces cerevisiae
caaaaaaacaatggaagaacaaagaaaatttagcggaagtaaaaataacagccgaaagccaaattcaggcttatcttgcctactctttcttttatcgaattcctttaggccgttgcaatagaaaagtaataaaaacgcatatacgtaagttgtagtcagtgtaattgcaatctattatgcgcatcaggtgcgcatactacatccattggtgcacaaaaaaaggaacgcagacaagaaaattattcagtttgctgttcgtgatgagccatccctgaatatgactaatgttaatgttcaatttgggatcttatttttttttgtgcagtaataagaatctttgaaaaaaaactatataagcctatatagtttgtaagatataagacaaaacacacctgcttttccactacacattttcgttattatataaaaaagacagccaagtatacttgtcaacaaaataaactcatagcaattacactataaaaacaatagcatcaaaa

SEQ ID NO: 6 - DNA, 500 bp, Saccharomyces cerevisiae
tggcaatcccctccgatcgtccgcggcaaaatggtcgtcaatcggacaaagggggatgatgggatctggtaatagaagaaaatatggactaaaggtagccgctaaagcgatccaggcatgtgttgccaatgatgtaagtcaagcgaaggaaatggttcagtaatatgatagacagactgcacttcaagggtgcgccccctcccccgcgcatatgcttacaacgcaaaataattgacgtttaatgtggatacttatcgtaatcgctgcattatagatttcgagtcatgttcacttaaccccacatatttatatagaacgcatcttcaaagtacttataaagtttagttttacatttttctgctttctatttcttctttttcggttcttcttcatgccagttggcatggcttaagagctttacttgtcgcttttatttaaaaccttctctcgggagaagacaattgttgatatacagtaattgtatttgcattatcactgct

SEQ ID NO: 7 - DNA, 344 bp, Saccharomyces cerevisiae
aacgtctatctatttatttttataactccgggatgtcattgccggtggtccgaaaatcggcaaataaggaaataagggaagaatatgcagtagtcaaatcatcagtgttctctttgatacctttcagggctaggaatagtgggggtggagtataatatcaaaaaccggacttaacattattggttcggttggaattggctataggcaaactagtctccggcatgatatataaatgacagcctgcaattgtatgttactacactcttgacttgtcgactacagtcgctgctcaggcacgagaataggaggtaagaaggtaacgtacgtatatatataaaatcgta

SEQ ID NO: 8 - DNA, 500 bp, Saccharomyces cerevisiae
gagctccgtggaataggcgagcggctgagtggttctccaagctacggtttttacgtgtagccccatgtgagcaagccaaacaagggcccttaaaggcgtgactacaaaaaggggcgggttggaaggtcatctgcagcgagatacgaaaagattttttgccagatttgcggttgggcggctatttcggtattgttggggtaacaaacgttggggaagactgcattttcttacagctttttttcgttatcgcgggttgggcggctatggcgccttctcctctgtactccaacctgtcagagacaccaagctgtatataaagcaccttggttggatcgtatttccctgagatcttgctataggttcattttatatatcgtccaatagcaataacaatacaacagaaactactagcatctgtttataagaaaaaggcaaatagtcgacagctaacacagatataactaaacaaccacaaaacaactcatatacaaacaaataat

SEQ ID NO: 9 - DNA, 500 bp, Saccharomyces cerevisiae
ccctatctttttttttttctcgcaatctggggaaagcttttctcatgcttatacgtgatttgttatataagggattgctatttcaggcatcattcacctccttttgtatccttagtttcactgcatttgatatatatatatacgtatctgtagtttccttccattacataacgcataatatactatttccatagtctatcttacatcttttttcttacttttgttaaggaacggataacgataaaacaaaaagagagatttaagattacttctgtaacttttttgatccattaccaaaactatattttttttcttttctctcctctggcattaaacacagttattgctacagctaatcatcgatataataatacatcacattaactgtctataagaggctggtacttagtagatggtgagaattttttatttttgtattttaacttcatttttgtaaacaagttggaactggaacttactatagaacaagagcttaaacc

SEQ ID NO: 10 - DNA, 500 bp, Saccharomyces cerevisiae
gttgtatcctattggatcacgggcgacggacaagacccgaagtgcggaccggcatggtcagcttgcacggaagctttaagggtttcccttgtttcggcattagaagaggcatttcgcacgttttaccgggtcagaaacttcgaggaagctgtgacaattggaaaaaaaggcaaaactaaatgcaatgtatccggttgcccatgcattatttgtgatgttttcggatgtagttcgctgcgctccgcggcgatatatcctctagcgagaggcatatgtataaatatatatatatatatctaacaaaagcattcaagtttctttctctggtgttacgtctttgttcgactttctctgcttacagccctgtatgaccaaagaaaaaataaaaagacagctacataccagcagaaattttttatagtattacactatacatccaagttttttcacaattatttattgtttttctcacatagaaaattccgcatactgcgattata

SEQ ID NO: 11 - DNA, 500 bp, Saccharomyces cerevisiae
gaaagcttattactgagttttgcggagcatcgctcggagcggcggaattgaatcgaaccgccgtgctattaccgaacaaaaaaattcgaaagcataaactcagtagtgaaaaacttgagaattttcagatgagtggcgactttccagtccttgcggttttgtcaccttagtcagctagtaaggaggccgtgtgggttagagtggctacaatcctcaaagggcacttctagaacccacggtgaattttttttggcatgataaatcggtagaatcggtgaagtaattacccaaaaaaggatcgggattgtgtttctcgtaattccgtattattgccgatggcatcgactacttcttttttcagaaaccccaacaagggtctattgtaattgtatataaacctttttgtaatggatatatacatgtggtactatttctcctcatcctgctccatcgaaaatcctcatacgaagagttaggaaagcaaagaaaacaacaaaaac

SEQ ID NO: 12 - DNA, 412 bp, Saccharomyces cerevisiae
agacacaatgcgaaaaatcgcgcagggacataatttttgttttcattattctttcgcttattccctccgttagctccaccgcttttttgattggaatttcctttcggcaatggctttccggttaccacgcctcgggtttcgcatcccgaaaagcatatctacacaagaaaaatgaatgataaacaattgatgagtggcgctatttcccttatcatctcattattgtacttagtatcgtctattatcaggagaaatcgcatgaactaagcccattttctcacccttctgccttcttatataaagcttgctgggaaccgaacacaaactccacaagtccgtagcagctcttctcttttgtcttttatatatcataaacatcgctacatagtaataacactaacgcacgctagaa

SEQ ID NO: 13 - DNA, 500 bp, Saccharomyces cerevisiae
aggggtagcggctttttcatcaactcgattattaccctttagagaccttccctaaagtgagcggcaattatttccggatgttagtagggtaatatggttacggatttgtgacacaaaagggcttttcaacagtcggtctgggttgaaggattttcaggatgacgaagctttcaataagagggactggactgttaacgcggggaattataggttactttccttgatctggctctggctctggctctgattttggctcttgtactcctcggacttcttgacttgtaacgaaatacgtcttttgtccttctcttcttcttccatagtaggggcgaatgaggggagcatagtggatccttctaaccatctagaatggggtggacaacatataaaagaagagcaatcttgcagcgcagtcatatttatgctaagtatatcattatttcttgctagcgtaagtcataaaaaataggaaataatcacatatatacaagaaattaaat

SEQ ID NO: 14 - DNA, 500 bp, Saccharomyces cerevisiae
agcctagtcccggtaaaccgcaaacggaccttaattgtgacgaagggcccaaatttgatgggtcggtgttaatgattagtcctcattgtcataataaagtgtgatgatggaggcaatgatgatatacggtagtactactgctcgaggtgctatcttttaaccaatcctttgagattcttgtcgccacggagttactaccttttacaaaccgtaatgtcacattttgcatatatcttatgtataaatatatagttcacttactacttgttctcgttttgttaactttcttgttgtagttcttcttgttcttggcgtttccccctttgttttctatctgcttcataagtaaagtgcaaagcattttggaagatattatcaattgagtcattgaaagaaacttggcatcttccctattactaaaactaagaatacttgattcaagaaagaagtttatattagttttagccgtaagataacataacaaagaagaagaaagaaaa

SEQ ID NO: 15 - DNA, 500 bp, Saccharomyces cerevisiae
tcgatcagctccaattaaatgaagactattcgccgtaccgttcccagatgggtgcgaaagtcagtgatcgaggaagttattgagcgcgcggcttgaaactatttctccatctcagagccgccaagcctaccattattctccaccaggaagttagtttgtaagcttctgcacaccatccggacgtccataattcttcacttaacggtcttttgcccccccttctactataatgcattagaacgttacctggtcatttggatggagatctaagtaacacttactatctcctatggtactatcctttaccaaaaaaaaaaaaaaaaaaaaaaaaaaaaaaatcagcaaagtgaagtaccctcttgatgtataaatacattgcacatcattgttgagaaatagttttggaagttgtctagtccttctcccttagatctaaaaggaagaagagtaacagtttcaaaagtttttcctcaaagagattaaatactgctactgaaaat

SEQ ID NO: 16 - DNA, 500 bp, Saccharomyces cerevisiae
acatagtactgtacgattactgtacgattaatctatccacttcagatgttcaacaattccttttggcattacgtattaatacttcataggatcggcaccctcccttaagcctcccctaaatgctttcggtacccctttaagacaactatctcttaaccttctgtatttacttgcatgttacgttgagtctcattggaggtttgcatcatatgtttaggtttttttggaaacgtggacggctcatagtgattggtaaatgggagttacgaataaacgtatcttaaagggagcggtatgtaaaatggatagatgatcatgaatacagtacgaggtgtaaagaatgatgggactgagagggcaattatcatccctcagaatcaacatcacaaacatatataaagctcccaattctgccccaaagttttgtccctaggcatttttaatctttgtatctgtgctctttactttagtagaaaggtatataaaaaagtatagtcaag

SEQ ID NO: 17 - DNA, 488 bp, Saccharomyces cerevisiae
aagttcttgactacccctatctcacactagtacgtaattcaatgtatcattcgtattgtaagtagatagagacgcaatacaggaaagctgaccttccttccaatcaccacggctgaaatgctttgttgaccaattacggacgcttaagagcggacgcggctggaacggctccatcctaaatcggcggagggagaactccgataccagccgacatggcaataatagtgacagtagatgctaccagccccgcaataatttcacagtagatcatcaacagtctcctcatttctggaaatgatcagcaacttcgacggatttaactctcaagcagttacgcactccgagaacagccgtgatcatctttgaacaagcaaaatatataaagcaggagaactgtcctacctagagctagaatagccataactaactatgtaacattctacagatcaatcaaaaacaatcttcaatcacagaaaaaaataaaaggc

SEQ ID NO: 18 - DNA, 329 bp, Saccharomyces cerevisiae
ttttctagttcttcttctgcaatattgccttttgggaagaaggatcgaaagtagccatttgcagacacgtttttactatatttactgtatcttcgattgcgcggctaaagttgccatattattattatattgcagctcaaccccgcatttccggagttttctttttttttatttggggtaatttggaggtcggcggctattggtgggccggaaatggtgacacacttgtaatatataaggaggaaatcctacatgtgtataagcgaaatcacaaggataataatgtattgctaaacaccctcaagaaagaaaataatcataacgaaatc

SEQ ID NO: 19 - DNA, 500 bp, Saccharomyces cerevisiae
cggatggaatcgccgcttttgaattcacctccggggtattattattattcttagtagtcgcggtcgtgcggacacccggagttatgcgggcccgaaagctcattatgtagtaaagctaggtaatgttaagggcgtaagagccaacgcaaggcagcaatagcctggtattcccacatatcaagaaagcttaaaaagttgagacagggaatttgaaggcgaagattgccgaactggccaatacccactactttttttttggtttgcttggtttcttcctgtcgcttgccaacttgtggcatcttccccacactatattataaggatcgtcctatgtataggcaatattatccatttcactcgctaacaaatgtacgtatatatatggagcaacaagtagtgcaattacagacgtgtattttgtcttgatcttgctttttgtatgataggcctaagaataacagtgcgaacatataagaaacatccctcatactaccacacat

SEQ ID NO: 20 - DNA, 500 bp, Saccharomyces cerevisiae
agaccttttttttctttttctgctttttcgtcatccccacgttgtgccattaatttgttagtgggcccttaaatgtcgaaatattgctaaaaattggcccgagtcattgaaaggctttaagaatataccgtacaaaggagtttatgtaatcttaataaattgcatatgacaatgcagcacgtgggagacaaatagtaataatactaatctatcaatactagatgtcacagccactttggatccttctattatgtaaatcattagattaactcagtcaatagcagattttttttacaatgtctactgggtggacatctccaaacaattcatgtcactaagcccggttttcgatatgaagaaaattatatataaacctgctgaagatgatctttacattgaggttattttacatgaattgtcatagaatgagtgacatagatcaaaggtgagaatactggagcgtatctaatcgaatcaatataaacaaagattaagcaaaa

SEQ ID NO: 21 - DNA, 500 bp, Saccharomyces cerevisiae
tccgaagagcgtgctaccaattcttcatctcgttaacaaactggttctccgttaaaaattgtgctatatgtcctataagccaactctatctatatcttttcttttagtcctactttggatactgttaccaccattttagattgctttttcttttgccgctagccttacaatatttggcaaactttttttttttagccgccgagactcttgatctatggccgggcgaaagggcaaatgactgcttatccccgccatcacttccccccgcccaagggtttagaattggggattaagtaaaaacgaatgactattcctctcaaagtcatccttgttcgacaaaaagaatggaatataacatattggaacaatttcatcctcttttccccattttcgcatataagagcaactaaacgccggtgagtaaagtgcccttccctacagactcttttactcaggtatatatatatatatatcccttaaaaactaaaaagaaagcactc

SEQ ID NO: 22 - DNA, 310 bp, Saccharomyces cerevisiae
agcggttgttctaaccactatttaaagccgcaattagtaatgcaaaaagttggccggaattagccgcgcaagttggtggggtcccttaatccgaaaaaggacggctttaacaaatataaactccgaaaatccccacagtgacagaattggagaaacaaccagttttgatatcgccatacatataaagagatgtagaaagcattcttcactgtaatgtccaaatcgtacatttgaatttcttgtaggtttatttaaaaggtaagttaaataaatataatagtacttacaaataaatttggaaccctagaag

SEQ ID NO: 23 - DNA, 340 bp, Saccharomyces cerevisiae
aatttttattttctccttccatatgagcgacagcggttactagccgctgtcctcaggttaatgatccaagtccgagatccgggccgaatatgcttgcggggaaagaaataaaagtgcattggagaagaaaaggatatgctcttcaattagaagcgccgaaacactaacatcatgctagcgatatcatacgtacactatataatgtaaaaaatgggcttaagaataactctcttatttcttaacttttgttgcggttgaagagcttataaaagtactagtggcctaaagaagctacagcgccgataataatatcgatttcgacttttctagtatttcgccg

SEQ ID NO: 24 - DNA, 500 bp, Saccharomyces cerevisiae
tgtgcacatacgtccagaatgatatcaagataaatggcacgtgtatgtacggctgtgtaaatatgataatcatctcggacgaacggcgtagcactctccatcccctaaaaatgttcacgtgtgactgctccatttcgccggatgtcgagatgacccccccccctcaaaaggcactcacctgttgacatgccgtggcaaatgattggggtcatcctttttttctgttatctctaagatccaaagaaaagtaaaaaaaaaaggttggggtacgaattgccgccgagcctccgatgccattattcaatgggtattgcagttggggtacagttcctcggtggcaaatagttctcccttcattttgtatataaactgggcggctattctaagcatatttctcccttaggttatctggtagtacgttatatcttgttcttatattttctatctataagcaaaaccaaacatatcaaaactactagaaagacattgcccactgtgct

SEQ ID NO: 25 - DNA, 500 bp, Saccharomyces cerevisiae
aatataaataaaattccatacagcatgtctaatcatagctaatttatacatattcatcatgaaaacatataggggaaaatatggtcggttaacacacctatcaaaaaattattcagcaattccaatctcgttagtaaaatatattcttattttttttttttttctctgattgtattatttctggagttttgacttatttttttaccacatcgcgcttttcgtccccaatctctctgatatatgatgctgtctataggtagccacttccccgatgtcggacctcgggccgtttacaaactttattgagatgaccttatttctccacattctagtcattcaacttttaccctcatatgtttaccttcactaatgtgaaagcatgaccaaagaaagtgtataaggtatataaatctgccataatgtatgtataacttattaggactttctcaaatagtattttggtattttctactgttctctgatgatcgagagcaaacaga

SEQ ID NO: 26 - DNA, 500 bp, Saccharomyces cerevisiae
aagtacgatatggtataactgtaacattgaaggactgaaggactgaaggactgaaggactatagtcaagggccaatggggaaggtcccttccaggccatttgcccgatagtttgtccttctcttgcttttccgacggcccgattgcatgtggcggggcagcactggataaaaaaacgtggggggagtgattaaatttatacgcttattgtgtcaacacggaaaccttatagttatcattactaacatcgcaacaagctgcttttttactcgtttttagccacaccataccccctttaattaactaataatgcataaaatagttattgcttcttgagttgcagcttcttcctggacgtactgttatatatggcatgtcttcgcatgtccgtcaaatttagcgttgtctcgaaacttaggctgtcgttcttgctgtctgtcttctgataaaataatatattggaataagaaaaaaaaaataggaacaagaaagtgtgtgaga

SEQ ID NO: 27 - DNA, 304 bp, Saccharomyces cerevisiae
atattattcagttgaaagacaaaaaaacataaatatttctatgagcaaacaatttgaacagaaaaataaaattggggaagtgacacaccatggtagcggttctaaagcgaaatcggcaaagcggctaaatagcagttttgatgacttactccacactgaaaatggatgaccttaaataggagataaagctttttcatccctatgtatttaagatgactggcttgtcaagcattctaatcataaaaaaaagatcgtatttgatcaagaatttatacatagacgccgctaaataattgaatacaaa

SEQ ID NO: 28 - DNA, 500 bp, Saccharomyces cerevisiae
ctcgtttgccgttacattgcattgatggtacaataaagggcatgctttatatcgagatgtttcagtgtatatgaggggaaacagaaaagagtcattcctgccattttttggtcactgctttttctgctatgagtaatggtgaagttccttgtggctacacgcttaatgtcatcgggttactgctcctaatatccgcatataagctttatgcagggatcagttgggcggctatttatctacacccagtcatccggcgtgactggatctccacttgccgcaataagtcggtggacaaatggagatttaagagtaaagatgcatgatggtataattcctttagtcgaaatagatatatttcaagcgcatatataggcagacgcttgtactgtagaaatagccgatattcaattgcgctctatgtgtgtttttattccaggttttccttggattctacgtattgtacgactttcttatcctccacaaacgtcatcgtgtcagta

SEQ ID NO: 29 - DNA, 500 bp, Saccharomyces cerevisiae
cccaacagatttcaagtctgtcgccttaaccactcggccatagtgcctaaaacaatgtaggttatttaagcaagtattgtagatacttttcgtaataaactacaatgcacccacgactcgcggtgtaatgatggcatgaaatcattgaacgaagttttgcggctatacggctgaaggacgagactaaagggacaggaattattaatgcggggtataatttgaatagtattaacgggcactgccgtttagccatcaaatgctattgttggggtattctctctactttttgttcttggcttgaaccttttcggcggttggcaatcgtccgtatataagcatcggctgtcccaatcctctattgcccttttcccttgcacctccttctcaattcttcgtatctttcgcgtaaaggtagatcttgattcacctatctgtcgaaacacgattaagtgcaaacgaaacaacgtacagtatataacaaagtattttaaataataaga

SEQ ID NO: 30 - DNA, 500 bp, Saccharomyces cerevisiae
gctatgacgtttgggtggcctagccggttcgcgtgtgcctgtcgcttttgtcgcttttcaacttctgcccgatatttcctatcaaaggaaaatgggacgttttcaacccctcgctatcatcgtgcctgcactctgcctatcgccaactacaccggggttttatctgcttcacccctccatccagtgctgataacaagaagaaccttgcagggtagggcaggacctacggccaaaatactaattatgtctgtttatgtacatgccccaatctgaatattccatgaatgtaggcacagcatatctccatccatgtactgatacagacgcataaacatatatgtatatacatacttatacactcgaatatttgtagactgatgtacttctatatatatatagggggtttgtgttcctcttcctttcctttttttttctctcttcccttccagtttcttttattctttgctgtttcgaagaatcacaccatcaatgaataaatc

SEQ ID NO: 31 - DNA, 500 bp, Saccharomyces cerevisiae
tagatgcgccatctccgagaaaaaatctagacaataacagcgacaattaacctaaagaggatagaagatcgagcaaaaaaatttttttaatatggggtcagtggcgatattatactataggagttaaagagtaagttgagtgtaaggtggtagaattatgattgaactccgaaactaagcgccgattatgggtggcaaagcggacagcttttgatatataatcgatcgctctcgtagttgatatcctctctcttgcttatcttttcctgtatatagtatatgtgtacatacagatacgaatatacctcagttagtttgttttaacattaaatattcaacagttgccagtagcaaaaagaatatatccattcatttcgagctttttcgtctcattactgatatccaactaacagtctcctcatagacggtaccttactttcctttaatattataatactagtatagtcgcacatacttaactcgtctctctctaacacata

SEQ ID NO: 32 - DNA, 500 bp, Saccharomyces cerevisiae
ctacgtcgcctgttcgagcggctctgttcgttgcatgaaactaaaataagcggaaagtgtccagccatccactacgtcagaaagaaataatggttgtacactgtttctcggctatataccgtttttggttggttaatcctcgccaggtgcagctattgcgcttggctgcttcgcgatagtagtaatctgagaaagtgcagatcccggtaagggaaacacttttggttcacctttgatagggctttcattggggcattcgtaacaaaaaggaagtagatagagaaattgagaaagcttaagtgagatgttttagcttcaattttgtccccttcaacgctgcttggccttagagggtcagaattgcagttcaggagtagtcacactcatagtatataaacaagccctttattgattttgaataattattttgtatacgtgttctagcatacaagttagaataaataaaaaatagaaaaatagaacatagaaagttttagacc

SEQ ID NO: 33 - DNA, 500 bp, Saccharomyces cerevisiae
gagctatagtcttttgcgctttcaatacgtgtagcggtgtaccaaaagttgcacaaaaatgtagttgtcaatgaaagcgcactacgtatataatgactattttttttttcctgggttgcatgggtaatttgttgttaatatgcgattttcttggggaaaagggtgtcatagcgccaaaaactgccgtgcggcacagtatgtatgtttttgagtcgcggcgtttaagggcttggcataaaaagtggttcaagcgagtgataagttgggcgaatgtcgtcttttttgtaaccatgtctttcctgaaaacaacctgtaggcagctccactccacataagggctttctccaatggcaatgggagctcggaacaccggagtagaaatttttataatgtgtattgtataaaacttgcttgttatgcagtttttgttttttttgttactcttccgtagcacaatagacatatattagcggcaaaattgtagtgttgcgattattgcc

SEQ ID NO: 34 - DNA, 500 bp, Saccharomyces cerevisiae
gtgtagtattgatcttgttggtattgctagaaatgcttcagcaatactgtataaaatatggaaacgttgccatggcaagacaaaagaagtgatcttgagtgaaataatagagcccggatggccgggtaaattcaaccgctcgtaccgtttataatacgcataaacgccgaaaatgtctctattttagtcattccccagagtgcggtattgcgtacacctgtcatgcgttccttagtgccgatagatatactaatatcgatgcgtcacagtagcagatcatctctgacacttgtttccccatttttttttttcattttttaaagggtttctctacagcctacaggcctcccctaataagtcagcccctccctttggagtgcgctgttgacctgcgtatataagaggtatatcagtgccagtaggtaaacccatcttgcggggattgtaccaggaacatagtagaaagacaaaaacaaccaccgtacttgccattcgtatag

SEQ ID NO: 35 - DNA, 500 bp, Saccharomyces cerevisiae
catcaattagggcaaacttgaatagtcagctaggtcatatatttaaaatcaattagccctatgactacattaggtttattgttaggtctttacggctgcatatttgctttcgccgttcggcggggtcctgcgacgatttctgcgcggtcttgtatgggtggagttgacagttaaccctccggaccccctaccccggtgtgcccccggtccatctatccattttgcggtaacccctttgcgcgacagctgcttatcaaggtacctggatcgagccataaaaattgatctacacagatgagatggggcattgggatatattattagtcggagtatcattatagttattcagttttatgcaggttactggccaaacgtttttcttcatttggaataatcgtttaggagctactgttccggtataaagtaacaagcacagtagcagagtaatacgcagtgacgataatagagactagtaaaacagtcgagttgtcggacctaaa

SEQ ID NO: 36 - DNA, 500 bp, Saccharomyces paradoxus
tagtcttatctaaaaattgcctttatagtccgtctctccagtcacggcctgtgtaactgattaatcctgcctttctaatcaccattctactgtttaattaagggattttgtcttcatcaacggcttccgcccaaaaaaaagtatgacgttttgcccgcaggcgtgaagctgcccatcttcacgggcctgacctcctctgccggaacaccggccatctccaactcataaattggagaaataagagaatttcagattttcagaggatgaaaaaaaaaaggtagagagcataaaaatggggttcactttttggcaaagttacagtatgcttattacatataaatagagtgccgataatggctttttttcatcttcgaaatacgcttgctactgctcttccagcgtttttattacttctttcttgtttctccttagtatataaaatatcaagctacaacaagcatacaatcaactgtcaactgtcaattatattataatacact

SEQ ID NO: 37 - DNA, 496 bp, Saccharomyces kudriavzevii
ctctcaaatcttttagcgccaaggactccaactaattgtatcttgaatttgcctttacgatccgtttgtccagtcacggcatgtatatcttattaatcctgcctttctaatcacgtattctaatgttcaattaagggattttatcttcatcaacggctcccacgcaaaaaatgacgttttgcacacagacacgaaatacaccttccaccggaacaacggccatctccaacttataagttggggaaataagacaatttcagacttcagagaatgaaaaaaaaaaaaggtacatcacagatggggttcaggtttgctacaattgcagggagcctgtcacatataaatagacctccagtgatgatatctttcagtcttcaaacgtctcttgtcacagttctggtcgttctatatcacatctctcttggttctacttattgtctataatatcaagctacagcaagcatacaatcaactatctaccataccataatacaca

SEQ ID NO: 38 - DNA, 500 bp, Saccharomyces bayanus
gatccagttctccagtgacacagcctttatctggtcaaacctttctttctaatcacctatgctgatgcttaattaagggatttttgtctccatcaacggcatgcgcccaaaaatgacgttttttttaacccatagacacgaaactacccattttccaccggcctgacctaccaccggaacaacggccatctccaacttgcaagttggggaaattaagagcatcgcaggtttaatggaagaaaaaaaaaaggtacagcacagcgcaaatggagttagttcccttatgtcacacactcacacacagtcggtcagatcaagcatactgggtgcgtataaatagagtggccattgccaccctgtttatctcaaaatctgtcttgttagtggtcttctccctttttcaggttacaattctcttgtttctacttagtatataagtatatcaagctatattaagcatactatcaactgtcaactctatcctcaaaatacaatacaaa

SEQ ID NO: 39 - DNA, 480 bp, Saccharomyces mikatae
tttcccaaaaagtattatttttaagtgataattgataaaaggggcaaaacgtagacgcaaataaaacggaaataatgattctcagaccttttagcgtcaagaactgcaactaatcttatcttaaaattatctttataatccgtttctcccgtcacagtctgtgtatctgattaatcctgcctttctaatcacctattctaatgttcaattaagggattttgtcttcaccaacggcttccacccaaaagtaaaaaatgacgttgtacccacagacatcttcaccggcctgacctgccaccggaacaacggccatctccaactcataaattggagaaataagagaatttcagattctggaggatgaaaaaaaaaaaggtacagcataaatggggttttatgtgggtacaattacactaggactatcacatataaatagacgggcaatgtaggttcttttccacccttgagacagagttattc

SEQ ID NO: 40 - DNA, 500 bp, Saccharomyces castellii
tgtcgtggacgaaatacgccacaattttgccgagaaggtcattagtatgtccaagaaaccctaggtgtaaagtcgggaaatccgaatctccgattttggaggggcccatgccctactttttttcgccaggggtgaaattccaaacccgtgcgcgttcttggaatttgacagcgcattgagtatgtgctgcgtattcccactatcatgacgcgccctttatctgggaaaaatggaactggatgctgaaatatttcactctcagatcacatatcccaaatcctgtgagtgaattgtttggtcaggcgaccaaacaggaatatggaatagattctattctctggattctacaattatccattgttagcaaaacaaaaaaaactggtggtatatatattcagagcctaaaatttaaaggttggatctcaattttaaaagttttcattctgttttgtttttgtttcttcttagctcacgaataaccaaacaaaaaacaatcaata

SEQ ID NO: 41 - DNA, 500 bp, Saccharomyces paradoxus
caataggaaaaaaccaagcttcctttcatccggcacggctgtgttgtacatatcactgaagctccgggtattttaagttatacaagagaaatatgcgggctagactagcaagattctggactgtataacgttgtggataggcggataaagggcccaaacaggattgtaaagcttagacgcctctggttgggcaatggcatgtttgtgtattaagtaagacttggctgcgggatagcaaaactgagcagaatatagaaggccacaaaaaaaaggtatataagggcagcaaagtctttataatatatgtagattctcttctctgtgtaattcattcttgtgcttaccactcaaatatacagaagtaagacagataaccaacagcctttcccagatatacatatatctcattgtttcagtttaaacaataatcatatttgtttaactcaaaaataaaaaaaaactaaactcactcaatcaatcattccataaaaaaaaacaat

SEQ ID NO: 42 - DNA, 500 bp, Saccharomyces kudriavzevii
cttcctttcatccggcacggctgtgtccccacatctccctaaagctccgggtattttaagttatacaagggaaatatacgggctggactacaacttgcaggttgcacagcgttatggataggcggataaagggcccaagcaagatcgtgaagcttggacgcgtctggttggacaatggtgactttttgtgtattagataatgcttgactggagaatatcaggactgagcagagttaggaagaccacaaaaaaggtatataagggcaacaaagtctccgtgatatggataggctcttctctctggttacaattcattatttcagttgtttgctagatatagagatataatacatctaataaacagtcacttccagagatatatatatatacatatatctatctcctcctcccagcttaaataataactatatttgtttaactcgaagaaaaaaaaaattcaaatttactctatcaattcaattacctcataaaaaacaata

SEQ ID NO: 43 - DNA, 500 bp, Saccharomyces bayanus; identical to SEQ ID NO: 42

SEQ ID NO: 44 - DNA, 500 bp, Saccharomyces paradoxus
cgataccacacggtccattgggccggtggtgttagtcgacggatatatgcatctgtcccctttcccggcgagccggcagtcgggccgaggttcggataaatttttgcattgtattagtttctgtcatgagtattacttatggttcctttagagctaatcattagctcggtaccggctgttatgcaatttatgacttttcttctacagtgtcagccttgtgacgattatctatgaactttggatgtagcgcatcgagattcgtatctttcattggatagtaaatgggaaggatcgatgacccttattacattctttcctatacttaatatccatttaatctatcttcttgaaagtatataagtaacggtaaatttaccatacttatgctattctcatttatcccctaattttcttttaacttctcgccctacagtaactaagaataacggctactgtttcgaaattaagcaaagtagtaaagcacataaaagaataaagaa

SEQ ID NO: 45 - DNA, 500 bp, Saccharomyces kudriavzevii
agaccgaagcgggtaatggacggaattaagcaattgtcccctctcccggggagccgacagtcggaccgagcttcggataaatttctgtattgtttttgtttccgtcatgggtattattttcgggatccttttgccaaccccatagtcaatcgttaacatttaccggccaatatgtaggattatgactattctcctgcatgatcagcggaagtgacgattatctattaattttgaacttctacttcgtgatccggaatttaattggataataatgtgtccgaaggatcgagtgacccttatattctgtagttttttgttactggccatccaattcgtgttcttggaagtatataagttacagtcgattgacctttctcaagctattttcatctttctcctacatttacgtttctcttcttcaatacagcagctagaagttacgattactcctgtgaagataaacaaagtaatagtagcccacaaaaagagagaaagtaaaa

SEQ ID NO: 46 - DNA, 500 bp, Saccharomyces bayanus
gtagcagtccggaaataagcaaatgtcccctttcccgagctaaccaacggtcgggccgagcctcggataaatttttgctttgtttttgtttctgtcatgggtattatacatcatttatttagttaacccctagactaattagccggccattagtatgtaagattatgactatagtttgtaccggaaccctggtagcaactactcatgaactttgggctcagtatttcgcaatcccggttttaattggatagcctatcgcgaaggatcgatggatgacccttagaattgtctcttttgttactactcattcaatgcgtgtgctcttgcaagtatataagtcactctaaattagtttatacttgagctttttacatttctcccttgattgtttctttctcttttccccttgttctggtttattgtaatagctaagtgcaacgattaccgctgttaagttaaagaagagagacaagtaataatagtacacagcaaggaaaaaa

SEQ ID NO: 47 - DNA, 500 bp, Saccharomyces paradoxus
ttactaaataggctggcatcagctaacccggatggttgaatccggcttttgctacttgttgtccgatgaaaaggagcggcttcccttttgccccagatttccattcatccgagaggtcgcttatcagacttcgtcatttctcatttcatccgagatgatcaaaattgaagccaatcaccacaaaactaacacttaacgtcatgttacactaccctttacagaagaaaatatccatagtccggactaacattccagtatgtgactcaatattggtgcaaatgagaaaatcatagcagtcagcccaagtccgccctttaccagggcaccgtaattcacgaaacgtttctttattatataaaggagctactttactagcaaaattcttgtaattcctcttcccttgctaacttcttcttgttttcttttcctttttacacacagatatataacaattgagagaaaaactctagtataacataacaaaaaagtcaacgaaaaaa

SEQ ID NO: 48 - DNA, 500 bp, Saccharomyces kudriavzevii
gttacggtgccgcgccggtggccggtggtcttccggtaaacaaaaaaagctgcctccctttcgccccagatttccattcatccgagggcaccgcttgtcagactttatcgttttcctcatttcatccgagaagatcaattcaaaggcaatgaccacaaaagcaactcctaacgttgtgttacgctaccctttacacaaaatattcataacccgtaatgaatcctaaggtatgtgactcaattttggtgtagaaaatgaggaaaacgtaatactaagttaaagctcgccctttaaagtgaatattccttgaccatttgcgcaggcacacccgaattcacaaacgtttctttattatataaaggaccagctctgctagtcaaatttttataactgcttgttcagttgctgcttctttcttgtcaatttatttcttgtactgttcaactacataaagcaaagagaaaactctcagaataacataacaaagaagtcaacgaaaa

SEQ ID NO: 49 - DNA, 500 bp, Saccharomyces bayanus
acgaggctcggcgtttactgctgaatttccggaaagaaagggaaggttccctttaccccagatttccattcatccgaaggactgcttatcagaatttgacatttttctcattttatccgagaagatcaatttaaggctagtgaccacaaaactaactctcatgctgcgctaccgcaagtttcgctcacagaaagaaagcaagcacccatagtccggactacatccttgtatgtgactcaaatttttggcgttgccaattaaactgaagtgtaaagattacttcaagctcaccctttaaagtagaattccttaacggttttaaatagacacaccgaaattaataaacactttctttattatataaaggacagagtttattactggaattctcttaacgccttcctcccttactattgtatcttttcctttcacataatcgctacataactacatagagaaaactctcagattaacacagtaacaacgaagaaaacaaaaaa

SEQ ID NO: 50 - DNA, 500 bp, Saccharomyces cerevisiae
acagtttattcctggcatccactaaatataatggagcccgctttttaagctggcatccagaaaaaaaaagaatcccagcaccaaaatattgttttcttcaccaaccatcagttcataggtccattctcttagcgcaactacagagaacaggggcacaaacaggcaaaaaacgggcacaacctcaatggagtgatgcaacctgcctggagtaaatgatgacacaaggcaattgacccacgcatgtatctatctcattttcttacaccttctattaccttctgctctctctgatttggaaaaagctgaaaaaaaaggttgaaaccagttccctgaaattattcccctacttgactaataagtatataaagacggtaggtattgattgtaattctgtaaatctatttcttaaacttcttaaattctacttttatagttagtcttttttttagttttaaaacaccaagaacttagtttcgaataaacacacataaacaaacaaa

SEQ ID NO: 51 - DNA, 412 bp, Saccharomyces cerevisiae
atagcttcaaaatgtttctactccttttttactcttccagattttctcggactccgcgcatcgccgtaccacttcaaaacacccaagcacagcatactaaatttcccctctttcttcctctagggtgtcgttaattacccgtactaaaggtttggaaaagaaaaaagagaccgcctcgtttctttttcttcgtcgaaaaaggcaataaaaatttttatcacgtttctttttcttgaaaatttttttttttgatttttttctctttcgatgacctcccattgatatttaagttaataaacggtcttcaatttctcaagtttcagtttcatttttcttgttctattacaactttttttacttcttgctcattagaaagaaagcatagcaatctaatctaagttttaattacaaa

SEQ ID NO: 52 - DNA, 500 bp, Saccharomyces cerevisiae
tgggtcattacgtaaataatgataggaatgggattcttctatttttcctttttccattctagcagccgtcgggaaaacgtggcatcctctctttcgggctcaattggagtcacgctgccgtgagcatcctctctttccatatctaacaactgagcacgtaaccaatggaaaagcatgagcttagcgttgctccaaaaaagtattggatggttaataccatttgtctgttctcttctgactttgactcctcaaaaaaaaaaaatctacaatcaacagatcgcttcaattacgccctcacaaaaacttttttccttcttcttcgcccacgttaaattttatccctcatgttgtctaacggatttctgcacttgatttattataaaaagacaaagacataatacttctctatcaatttcagttattgttcttccttgcgttattcttctgttcttctttttcttttgtcatatataaccataaccaagtaatacatattcaaa

SEQ ID NO: 53 - DNA, 800 bp, Saccharomyces cerevisiae
catgcgactgggtgagcatatgttccgctgatgtgatgtgcaagataaacaagcaaggcagaaactaacttcttcttcatgtaataaacacaccccgcgtttatttacctatctctaaacttcaacaccttatatcataactaatatttcttgagataagcacactgcacccataccttccttaaaaacgtagcttccagtttttggtggttccggcttccttcccgattccgcccgctaaacgcatatttttgttgcctggtggcatttgcaaaatgcataacctatgcatttaaaagattatgtatgctcttctgacttttcgtgtgatgaggctcgtggaaaaaatgaataatttatgaatttgagaacaattttgtgttgttacggtattttactatggaataatcaatcaattgaggattttatgcaaatatcgtttgaatatttttccgaccctttgagtacttttcttcataattgcataatattgtccgctgcccctttttctgttagacggtgtcttgatctacttgctatcgttcaacaccaccttattttctaactattttttttttagctcatttgaatcagcttatggtgatggcacatttttgcataaacctagctgtcctcgttgaacataggaaaaaaaaatatataaacaaggctctttcactctccttgcaatcagatttgggtttgttccctttattttcatatttcttgtcatattcctttctcaattattattttctactcataacctcacgcaaaataacacagtcaaatcaatcaaa

SEQ ID NO: 54 - DNA, 430 bp, Saccharomyces cerevisiae
tatatctaggaacccatcaggttggtggaagattacccgttctaagacttttcagcttcctctattgatgttacacctggacaccccttttctggcatccagtttttaatcttcagtggcatgtgagattctccgaaattaattaaagcaatcacacaattctctcggataccacctcggttgaaactgacaggtggtttgttacgcatgctaatgcaaaggagcctatatacctttggctcggctgctgtaacagggaatataaagggcagcataatttaggagtttagtgaacttgcaacatttactattttcccttcttacgtaaatatttttctttttaattctaaatcaatctttttcaattttttgtttgtattcttttcttgcttaaatctataactacaaaaaacacatacataaactaaaa

SEQ ID NO: 55 - DNA, 466 bp, Saccharomyces cerevisiae
gcggatctcttatgtctttacgatttatagttttcattatcaagtatgcctatattagtatatagcatctttagatgacagtgttcgaagtttcacgaataaaagataatattctactttttgctcccaccgcgtttgctagcacgagtgaacaccatccctcgcctgtgagttgtacccattcctctaaactgtagacatggtagcttcagcagtgttcgttatgtacggcatcctccaacaaacagtcggttatagtttgtcctgctcctctgaatcgtctccctcgatatttctcattttccttcgcatgccagcattgaaatgatcgaagttcaatgatgaaacggtaattcttctgtcatttactcatctcatctcatcaagttatataattctatacggatgtaatttttcacttttcgtcttgacgtccaccctataatttcaattattgaaccctcac

SEQ ID NO: 56 - DNA, 382 bp, Saccharomyces cerevisiae
acaaatcgctcttaaatatatacctaaagaacattaaagctatattataagcaaagatacgtaaattttgcttatattattatacacatatcatatttctatatttttaagatttggttatataatgtacgtaatgcaaaggaaataaattttatacattattgaacagcgtccaagtaactacattatgtgcactaatagtttagcgtcgtgaagactttattgtgtcgcgaaaagtaaaaattttaaaaattagagcaccttgaacttgcgaaaaaggttctcatcaactgtttaaaaggaggatatcaggtcctatttctgacaaacaatatacaaatttagtttcaaagatgaatcagtgcgcgaaggacataactca

SEQ ID NO: 57 - DNA, 400 bp, Saccharomyces cerevisiae
agtgcttttaactaagaattattagtcttttctgcttattttttcatcatagtttagaacactttatattaacgaatagtttatgaatctatttaggtttaaaaattgatacagttttataagttactttttcaaagactcgtgctgtctattgcataatgcactggaaggggaaaaaaaaggtgcacacgcgtggctttttcttgaatttgcagtttgaaaaataactacatggatgataagaaaacatggagtacagtcactttgagaaccttcaatcagctggtaacgtcttcgttaattggatactcaaaaaagatggatagcatgaatcacaagatggaaggaaatgcgggccacgaccacagtgatatgcatatgggagatggagatgatacct

SEQ ID NO: 58 - DNA, 500 bp, Saccharomyces cerevisiae
ggagattgataagacttttctagttgcatatcttttatatttaaatcttatctattagttaattttttgtaatttatccttatatatagtctggttattctaaaatatcatttcagtatctaaaaattcccctcttttttcagttatatcttaacaggcgacagtccaaatgttgatttatcccagtccgattcatcagggttgtgaagcattttgtcaatggtcgaaatcacatcagtaatagtgcctcttacttgcctcatagaatttctttctcttaacgtcaccgtttggtcttttatagtttcgaaatctatggtgataccaaatggtgttcccaattcatcgttacgggcgtattttttaccaattgaagtattggaatcgtcaattttaaagtatatctctcttttacgtaaagcctgcgagatcctcttaagtatagcggggaagccatcgttattcgatattgtcgtaacaaatactttgatcggcgctat

SEQ ID NO: 59 - DNA, 1041 bp, Aspergillus tubingensis
atgctgggattcccaatgttcaacccagctacgcctgatgtctggaagatgaataccccttactttccatttgttacaccggggttatttcctgcctcagcacccccatcgcccaccaacgtagatgccgaagctgccagttcccaacagtcggaagcaagctatctggataaggagaaaattgttcgagggccacttgattatcttctcaaatcccctggaaaagacattcgtcggaaattcattcacgcgttcaatgaatggctgcgcattcctgaggacaagttgaatattatcacggaaattgttggattgcttcacacggcctcccttctaatcgacgatattcaggacaattccaagcttcgacgcggcctcccagtggcccatagcatatttggtattgcgcagacaattaactctgccaattatgcgtactttctagcccaggaaaggctccgcgaactgaatcatcctgaagcgtacgaaatatacacagaggaactgcttcgtctgcaccgcggtcaaggtatggacttgtactggcgggactgcctaacctgtcccacagaggaggactatattgagatgatcgccaacaagactggtggcctatttcgactggcgattaagcttatgcagttggaaagcactttgtgcagcaatgtcattgaactagcagacttgttgggcgtgatctttcagattcgggatgattaccaaaacttacagagtggactatacgccaagaacaagggattttgcgaggatttgacggagggaaaattttcctttctgattatccacagtattaacagtaacccgaacaatcaccatctgctaaatatactacggcagcggagcgaggacgattcggtgaagaagtatgctgttgattatatcgactcgacggggagttttgactactgccgggaacggctcgcttccttattggaagaggcggatcaaatggttaagaagttggaaaatgaggggggacaatcaaaggggatctacgatattctgagctttctgtcgtga

SEQ ID NO: 60 - DNA, 732 bp, Aspergillus tubingensis
atggatgggttcgaccattctactgctccaccaggatataacgagctaaaatggctcgccgatatcttcgtcatcggaatggctgttggctgggttgctcactatatggagatgattcacacgtcgttcaaggaccaaacatactgcatgaccatcgggggcctttgcatcaattttgcctgggaaatcatattctgcacaatgtatcctgccaaaggatttgtcgagcgggttgcctttctcatgggcatttctctcgaccttggggttatttacgcgggaatcaagaacgccccaaatgaatggcaccactctgcaatggtgagggaccatatgccccttgtcttcgcagcaacgacactttgttgtctgagcggtcatatggctcttactgcccaggttggtcccgcacaagcctatacgtggggggcaattgcatgccagctctttatcagcatagggaatgtgtttcaattgttgagtcggggaaacacacgaggggcgtcatggacgctatggacctccaggttttttggatcaacatcagccattggctttgctcttgttcgatatattcgctggtgggaggccttttcttggttgaactgcccgcttgtgatatggtccgtggccatgttctttctgtttgaaacactctatggagccctattctattctgtcaagcgacaagaagggagatcccagcgtggaatcaagcacaaagagaggtag

SEQ ID NO: 61 - DNA, 1008 bp, Aspergillus tubingensis
atggcggcacttccggacgttgcctccattcccatccctctggtggcaaccctaggcattgcccctctaattttctatctcgtccttgatagaattagccccttgtggccaaattccaaagctttcctgattggcaagaagaaaccggagaccgtgacatcgttcgagtgcccatatgcctacatccgtcagatctatgggaagtatcactgggagccattcgtacagaagctgtctccgaggcttaaggatgaggatccggccaaatataagatggttctggagataatggatgcaatccacctgtgtctgatgctagttgacgatataactgacaatagcgactatcgaaaaggcaagccagcagcccaccggatatatggcccttcagagacagcaaatcgcgcttactaccgagtcacccagattctaaacaagaccgtgcaaaagttccccaagctggccaagttcctgcttcagaatctggaagaaattctcgaaggccaagacctgtcactaatctggcgacgggatggactgggtagcctttcgactgttcctgatgagcgagttgcagcctatcgcaagatggcgtcattgaaaactggggcgttattccggctgctggggcaattggtgatggaggaccaatcgatggacgggacgatgactactcttgcgtggtgctctcagctgcagaatgactgcaagaatgtctactcatctgaatatgctaaggccaaaggggcgcttgccgaagacctccgaaatcgagagctctcatttccaattatcctcgcgctggaagctcctgaagggcattgggtcgccagtgctttggagaccagctcaccgcgcaacattcgcaaggcgcttgctgtgattcagagtgagagagtgcgcaatgcttgtttcaaggagctcaagtcggcgagtgcttcggtccaggactggttggctatttggggacggaacgagaaaatgaacttgaagagccagcagacgtag

SEQ ID NO: 62 - DNA, 1416 bp, Aspergillus tubingensis
atggccaatgcccagcaacccccctttcgcatccttattgtgggcggttctgtcgcaggcctcatccttgcgcactgtctcgaacgcgccaatatagagtacctcatactcgaaaaaggagaagatgttgctccacaagttggtgcctcgataggtatcatgccaaatggcggacggatcctcgagcaactgggcctatttggggagattgagcgtgtgatcgagccgttgcatcaggcgaatatcagctatccagatgggttctgctttagtaacgtctatcctaaggttcttggcgacaggttcggatacccggttgcattcttggaccggcagaagttcctgcagattgcatatgaggggctgagaaagaagcagaatgttctcaccggtaaaagggtagttggactgcgacagtcggatcaagggactgctgtttctgtggctgacgggacagagtatgaggcggatctcgtggttggtgctgatggagtacatagtcgggtgagaagtgagatttggaagatggcggaagagaatcagcctgcatcagtttcgacacgtgaaagaagaagcatgactgttgaatatgtctgcgttttcgggatttcatcagccatcccagggctcgagataagcgaacagatcaacggtattttcgaccatctatccattctaacaatccatggcagacatggtcgcgtgttctggttcgtgatccagaagctggataggaagtacgtctatcctgatgtcccgcgattctcagacgaggatgccgtacagctcttcgatcgggtcaaacacgtgcggttctggaaaaacatctgtgtgggggacttgtggaagaacagagaggtgtcctcgatgacagcgctggaggagggagtgttcgagacatggcatcatgataggatggttttgattggagatagcgttcacaagatgacgcccaactttggccaaggagctaattcagccatcgaggatgctgccgcgctctcttcccttctacatgatctcgtcaacgcccgtggagtttgcaagccatcgaatgtccagattcagcatctcctcaagcagtatcgggagacccgatacactcgcatggtaggcatgtgtcgcaccgcggcttcagtctctcggattcaggcccgagatggcatcctcaacaccgtctttggacgatattgggcaccttatgctggcaacctgcctgctgacctggcatcaaaagtgatggcagatgcagaggttgttacttttctgcccttgccagggcgctcaggaccgggctgggagatgtacagacgaaaggggaagggagggcaggtgcaatgggtgcttataatcttaagcttacttacgattggtggattgtgcatctggctacaaagcaatgcgttgagtagataa

SEQ ID NO: 63 - DNA, 7050 bp, Hypomyces subiculosus
atgccttctaccagcaatccatctcacgtccctgtggccatcatcggcctggcatgccgattcccaggcgaggccacctcaccatcaaaattctgggatcttcttaagaatggacgagatgcctactcaccaaataccgatcgatataacgctgatgccttttaccatcccaaggcaagcaaccgccaaaacgtgctggcaactaagggcggccacttcctcaaacaggacccatacgtttttgacgccgctttctttaacatcacagccgctgaggccatctcctttgaccccaagcagcgaattgccatggaagttgtctacgaggctctagaaaatgccggaaagacactacccaaggtggcgggcacacaaactgcttgctatatcggctcttccatgagtgattaccgagacgctgttgtgcgtgactttggaaacagccccaagtatcatatcctgggaacatgcgaggagatgatttcaaatcgtgtgtcccatttcttggatattcacggccccagtgccaccattcatacagcctgctcatcaagtcttgttgctacacacttggcttgccaaagtttgcaatctggagagtcagaaatggccatcgctggtggtgttggtatgatcatcacccctgatggtaatatgcatcttaacaacttgggattcttgaaccccgagggccactcccggtcatttgatgagaatgctggtggttacggtcgtggtgagggttgcggtatcctcatcctcaagcggctagacagagctctcgaagatggtgattccattcgcgccgtcattcgagcctctggtgtcaactctgatggctggacacagggtgtcaccatgccctccagccaagcccagtctgcccttatcaaatacgtatacgaatcgcatggcctggattatggtgcgactcaatacgttgaggctcacggtactggtaccaaagccggtgatcccgcagagattggcgccctccaccgcacaattggacagggcgcgtccaagtctcgaaggctttggattggcagtgtcaagccaaacattggccatcttgaagccgccgccggtgtggctggtatcattaagggcgtcctgtccatggaacacggcatgattcctccaaacatttacttctccaagcccaaccctgccatccctcttgacgagtggaacatggccgtgcctaccaagttgactccctggcccgccagccaaactggtcgccgtatgagtgtcagcggtttcggtatgggtggtaccaacggccacgtcgtccttgaggcctacaagccccaaggaaagctcaccaacggccataccaacggcatcaccaatggaatccacaagactcgccacagcggcaagaggcttttcgtcctcagcgcccaggatcaagctggcttcaagcgtttgggtaacgccctggtggagcatctcgatgccctgggccctgccgctgccacccctgagttcctcgccaacctctcccacactcttgccgttggcagatctggcttggcttggaggtccagcatcatcgctgagagcgcccctgatcttcgggagaagctggcaactgatccgggtgagggagccgctcgttcttcaggcagcgagccccgtattggattcgtcttcacgggtcaaggtgctcagtgggcccgcatgggcgttgagttgttggagcgccccgtcttcaaggcttccgtgattaagtccgcggagactttgaaggagctcggctgtgaatgggaccctatcgttgagctttccaagcctcaagctgagtctcgacttggtgttcctgaaatctcacagcccatctgcacagtcctacaagtcgccttggttgatgagttgaagcactggggtgtatcaccttccaaggtggtcggtcactccagtggtgaaatcggtgccgcatacagcattggcgctctttctcaccgtgacgctgtcgccgctgcttacttcaggggcaagtcttccaacggagccaagaagcttggtggtggtatgatggctgttgggtgctctcgtgaggacgctgacaagctcctctctgagaccaagctcaagggcggtgttgctaccgtcgcatgtgtcaactccccctccagcgtgaccatctcaggcgatgccactgctctcgaggaactccgagttattctcgaggagaagagtgtgtttgctcgaagactcaaggtcgacgttgcctaccactctgcccacatgaacgctgtctttgccgaatactctgctgcgattgcccacattgagcccgctcaggcagttgaaggtggaccgattatggtctccagtgtcactggtagcgaagtcgactctgagcttctcggcccttactactggacccgtaacttgatctctcccgtcttattcgccgacgctgtcaaggaattggttacccctgctgatggcgacggccaaaacaccgtcgatctcctgattgagattggtcctcacagcgctcttggtggccctgttgagcagattctgtcccataacggcatcaagaatgttgcttacagatctgctcttactcgtggcgagaacgctgttgactgcagcctcaagcttgctggcgagctcttccttctcggcgtgccctttgagttgcaaaaggccaacggtgactctggttctcgcatgctcactaacctacctccttatccttggaaccactccaagtcattccgtgccgactctcgtctccaccgtgagcatctggagcagaaattccctactaggagtctcatcggtgcacctgtccccatgatggcagagagcgagtacacatggcgcaacttcatccgtctcgctgacgagccttggctccgtggtcacactgtcggtaccaccgttctgtttcctggtgccggtatcgtgagcatcatcttggaagctgctcaacagctggtggataccggcaagaccgttcggggcttccgaatgcgcgatgtcaacctcttcgccgccatggctctccccgaggacctggctactgaggttatcatccacatccgacctcaccttatctctactgttggatcaaccgcccccggtggatggtgggagtggactgtttcctcctgcgtcggaactgaccagctgcgagacaatgctcgcggtctggtagccattgactacgaagagagccgcagcgagcagatcaacgccgaggacaaagcgttggttgcttctcaggtcgcggactaccacaagatcctcagcgaatgccctgagcattatgctcatgacaagttctaccagcacatgaccaaggcctcttggagctacggcgagctcttccagggtgtggagaatgtccgtcctggatacggaaagaccatctttgacatcagagtcattgacattggtgagacctttagcaagggacaacttgagcgacctttcctcatcaacgctgccactctcgatgctgtattccagagctggctcggcagtacctacaacaacggtgctttcgagtttgacaagcccttcgttcccacctctattggcgagttggaaatctctgtcaacattcccggtgatggcgactacctcatgccaggccactgccgctctgagcgatacggcttcaacgagttgtctgctgatattgccatcttcgacaaggatctgaagaatgtgttcctttcagtgaaggatttccgaacttccgagcttgatatggattccggcaagggagacggagatgccgctcacgtcgaccctgccgatatcaactcggaggttaagtggaactacgctcttggcctcctcaagtccgaggaaatcaccgagctggtcaccaaggtcgccagcaatgacaagctcgccgagcttctccgtctgacacttcacaacaaccctgctgccactgtcatcgagcttgtttctgatgagagcaagatctctggcgcatcttctgccaagctgtccaagggccttatcctccccagccagatccgttacgtagttgtcaaccctgaggcagcggacgccgactctttcttcaaattcttctcccttggtgaggatggtgcccctgtcgctgctgaaaggggccccgccgaactgttgatcgcctccagcgaagtcactgacgcggctgtccttgagcgcctgattaccttggccaagcctgatgccagcattcttgttgctgtcaacaacaagactaccgccgctgccctctcagccaaggcgttccgtgttgtcaccagcatccaggacagcaagtccattgctctctacactagcaagaaggcgcctgccgccgacacctccaagctcgaggccatcatcctcaagccaaccactgctcaacctgccgcccagaatttcgcctccatcctccagaaggcactcgagctccagggctactctgtcgtttctcagccatggggcaccgacatcgacgtcaacgatgccaagggaaagacctacatttctctgttggagcttgagcagcctctgctcgacaacctctccaagtccgacttcgagaacctccgcgcagtcgttttgaactgcgagcgtctcctgtgggtcacagcaggtgacaacccatctttcggcatggttgatggtttcgctcgctgcatcatgagcgaaattgccagcaccaagttccaggtcctgcatttgagcgctgcaactggtctgaagtacggatcttctctcgccacccgcattctccagtcggatagcaccgacaacgagtaccgggaggtcgatggtgctctccaggtggcccgtatcttcaagagctacaacgagaacgagagtctccgccaccacctcgaggataccaccagcgttgtgactcttgctgaccaggaggatgctctgcgcctcactattggcaagcctggtcttttggatactttgaagtttgtccccgatgagcgtatgctcccacctctccaggatcacgaggttgaaatccaggtcaaggctactggtctgaacttccgagacatcatggcttgcatgggtcttattcctgttcgatctctgggccaggaggccagtggcatcgtcctcagaaccggtgcgaaggctaccaacttcaagcctggcgaccgtgtttgcaccatgaacgtcggaacacatgccaccaagatccgagccgactaccgtgtcatgacaaagatccccgactccatgacctttgaagaagctgcctcggttgctgttgttcacaccaccgcctactacgccttcatcaccatcgccaagcttcgcaagggccagtccgtcttgatccacgccgccgctggtggtgttggccaagcagccattcagttggccaagcatctcggcctcatcacctatgttaccgtaggtactgaagacaagcgccagctcattcgggagcagtatggcattcccgacgagcacatcttcaactcccgtgatgccagcttcgtcaagggtgtccagcgtgttaccaacggtcgcggtgtcgactgcgttctcaactctctatccggtgagctcctgcgtgcttcttggggatgccttgctacctttggtcatttcatcgaaattggtctccgtgatatcaccaacaacatgcgtcttgacatgcgacctttccgcaagagcacctccttcacattcatcaacacccacactctcttcgaggaagaccccgctgcgttgggagatattctcaacgagtccttcaagctcatgttcgctggcgcccttaccgctcctagccccttgaatgcctatcccattggccaggtcgaggaggccttccgaaccatgcagcagggcaagcaccgcggtaagatggtgctgtccttctccgatgacgcaaaggctcccgtgttgcgcaaagcgaaggattccttgaaactggaccctgacgccacttacctctttgttggtggtcttggtggtctgggtcgcagtcttgccaaggagtttgttgcgtctggcgcccgcaacattgccttcttatcccgatccggtgacactaccgcccaggccaaggctatcgtggacgaattggctggccagggtatccaggtcaaggcctatcgtggtgatatcgccagcgaggcatccttcctccaggctatggagcaatgctctcaggatctcccgcccgtaaagggtgtgatccagatggccatggttctccgcgatatcgtctttgagaagatgtcgtacgatgagtggaccgtccccgttggccccaaggtccaaggttcatggaacttgcacaagtacttcagtcatgagcgacctcttgacttcatggtcatctgctcctcaagctccggtatctacggttatcccagtcaggctcaatacgccgctggcaacacttaccaggatgccttggctcactaccgtcgctctcagggcctgaacgccatctccgtcaacttgggtatcatgcgagatgtcggtgtcctggctgagacgggtaccactggtaacatcaagctctgggaagaggtcttgggcatccgcgagcctgccttccacgctctcatgaagagcttgatcaaccatcagcagcgtgggtctggggactacccggcgcaggtctgcactggtcttggtactgctgacattatggctactcacggcctggcccggcccgagtatttcaatgacccccgttttggaccccttgccgtcaccactgtcgcgaccgatgcttcagctgacggccagggctctgctgtctcgctcgcctctaggctctccaaggtttccaccaaggatgaagctgccgagatcattaccgatgctctggtcaacaagacggcagacatcctgcagatgcccccctctgaagtcgaccccggccgacctctgtaccgttatggtgttgactcccttgtggcgcttgaggtgcgaaactggatcacaagggagatgaaggcgaacatggcgctgctggagattctggcagccgtccccattgagagcttcgctgtcaagattgctgagaagagcaagttggttactgtttaa

SEQ ID NO: 64 - DNA, 6150 bp, Hypomyces subiculosus
atggtgactgtaccacagactatcctctactttggagatcagacagactcctgggttgattccctcgatcagctatacagacaagccgctacgataccatggctacagacgtttctcgacgaccttgtaaaggtcttcaaggaagagtcccggggcatggatcatgcgttacaagacagtgttggtgaatactctacactactcgacttggcggatagataccgccatggcaccgacgagattggtatggtgcgtgctgtcttgctacatgccgcgagaggaggcatgctattacaatgggtgaagaaagaatcacagcttgtggacctcaatggctccaagcctgaagcactcggtatctctggaggactcaccaacctcgcagcactggcgatatccacagacttcgagtctctatatgacgcagtcattgaggctgcgagaatatttgtcagattatgccgttttacttcggtacgatcaagagctatggaggaccgacctggcgtttggggctgggcagtgctgggaattacaccagaggaactgagcaaagtgcttgagcagttccaatccagcatggggattcctgccatcaagagagctaaggttggcgtaacaggagaccgatggagcaccgttattgggccaccctcagtcttggacctattcatccaccagtgtcccgctgtgcgcaacctccccaagaatgaattgagcatccacgcccttcagcacacagtcacagtcacagaggctgacctcgacttcattgtcgggagtgctgagcttcttagtcaccccattgtgccagacttcaaagtctggggaatggatgatcctgtggcatcctaccagaactggggagaaatgctaagagcaatcgtcactcaagttttgtccaagcctttggacattaccaaggtgattgcgcaactcaacactcacctcggccctcgtcatgtcgacgtccgagtcatcggacctagcagccacaccccctacttggcgagttcgctcaaagctgctggcagcaaggctattttccagaccgataagactcttgagcagttacagccgaagaaactccccccgggccgcatcgccattgtcggtatggctggccgtggtcctggctgcgagaatgttgatgagttctgggacgtcattatggcgaagcaggatcgttgtgaagagattcccaaagatcgcttcgacatcaatgagttctactgtaccgagcacggggagggttgcaccaccaccacaaaatacggctgcttcatgaacaagcctggaaactttgactcccgcttcttccacgtgtcgcctcgtgaggcgctgttgatggaccccggtcacaggcagttcatgatgagcacttatgaagctcttgagacggcaggatactctgatggccagactagggacgttgatcctaataggatcgcggcgttctatggccagtccaacgatgattggcatatggtgagccattataccctgggttgtgatgcctacaccctgcagggggcgcaaagagccttcggcgctggtcgcatcgccttccacttcaagtgggagggcccaacatactcgctcgattctgcatgtgcctccacctcctctgctattcacctggcctgcgtgagtcttctatccaaagatgtggacatggctgttgtgggtgctgccaacgtcgtcgggtatcctcactcctggacaagtcttagcaagtctggtgtcttgtccgacactggaaactgcaaaacctactgcgatgatgctgatggttactgccgagcagactttgtcggctcagttgtgctgaagcgtctcgaagatgctgtcgagcaaaacgacaacatcttggctgtcgtggctggttcaggcagaaaccactccggcaactcttcatccatcaccacgtcggatgccggtgcccaggagagactgtttcacaagattatgcacagcgccagagtctctcctgatgagatctcatatgttgagatgcacggcactggaactcagattggcgatccggccgagatgagtgctgttaccaatgtcttcaggaagaggaaggcgaataaccccctaactgttggtggaatcaaagcgaacgtcgggcatgctgaagcttctgctggcatggcctccctgctcaaatgcatacagatgttccagaaagatattatgccccctcaggctcgaatgccccatactctcaacccaaagtatccgagtctttctgagcttaacattcatatcccctccgagccgaaggagttcaaggctatcggcgagcggccacgacgcatcctccttaataactttgacgcagcaggtggcaacgcctctctcattctggaagacttcccctccaccgtcaaggaaaatgcggaccccaggccaagccatgtcatcgtttcctctgccaaaacacaatcctcatatcacgcgaataagcgtaacctcctgaagtggctacgcaagaacaaagatgctaaactcgaagatgttgcatacacaaccaccgcccgcagaatgcaccaccccctcagattctcttgcagtgcctccacaacggaggagctcatttccaagcttgaggcagacacggcagatgcaactgcgtctcggggctcgcccgttgtcttcgtattcacgggacagggctctcactacgccggcatgggtgccgagttgtacaagacatgccctgctttccgcgaggaagtcaacctctgtgccagcatctctgaggagcacgggttccccccgtacgtggatatcatcaccaacaaagatgttgacataaccaccaaggacaccatgcagacacagctcgctgttgtcacgctggagatcgccctcgccgcattctggaaggcgtctggtatccagccgtcagcagtcatgggtcactccctgggcgagtatgtggctctccaggtcgcaggggtcctatctctagctgatctgctctacctcgtcggcaatcgggcccgtctcctgctggagcgctgcgaagccgacacctgcgctatgttggcagtatcaagctctgctgcctccatccgcgagctcatcgaccagcgcccgcagtcatccttcgagattgcatgcaagaatagccccaatgccacggttatcagcggcagcactgatgagatttctgagctccagtcatccttcacggcatcacgagccagggctctgtctgtgccctatggatttcactccttccagatggatcccatgctcgaggattacatcgttcttgcgggtggtgtaacctactcgccaccaaagattccagttgcttcaaccctgctcgcttcgattgtggagtcttcaggggtcttcaacgcttcctacctcggtcagcaaacccgccaagctgtcgacttcgtcggtgctcttggcgccttgaaggagaagtttgctgaccctctctggctggagatcggacccagccaaatctgcagctcctttgtccgggcgactctctcaccctcgccgggcaaaatcttgtccactttggaggcaaataccaacccctgggcatccatttccaagtgcctcgccggcgcgtacaaggatggtgtcgcagttgactggttggcggtgcatgctccattcaagggcggcttgaagctcgtgaagttgcccgcctatgcatgggacctcaaggacttctggattgtctactctgaggccaacaaggctgctcgagctttggctcccgctccctcgttcgaaacacagaggatttctacatgtgctcaacagattgttgaagaatcatcatcacccagcctccatgtctctgcccgagctgctatctccgatcctggcttcatggccttggtcgacggtcatcgcatgcgcgatgtgtccatctgccccggaagtgtcttctgcgaggcaggccttgccgtctccaagtacgcactgaagtacagtggccgaaaggataccgtggaaacaagacttacaatcaacaacctgtctctcaagcgcccgctcacaaagtctcttgtaggcaccgatggcgagcttctcaccacggttgttgcagacaaggcctccagcgataccttgcaggtttcatggaaggcttcttcctctcatgcatcatacgatcttggtagctgcgagatcaccatttgtgatgcccagactcttcaaactagctggaacagaagctcatacttcgtcaaggctcgtatgaacgagttgatcaagaatgtcaagagcggaaatggtcaccgcatgctccccagtatcctctacactctcttcgctagcacagttgattatgaccctaccttcaagtctgtcaaggaggccttcatctcaaatgagtttgacgaagctgctgcggaggtggtgcttcagaagaacccggctggaactcagttctttgcgtccccttactggggtgagagcgtagttcatcttgccggtttcctcgtgaactccaaccctgcccgcaagactgcttctcagacgaccttcatgatgcagagtcttgagagcgtcgagcagaccgctgatctcgaggctggacgcacttactacacctatgctcgcgttttgcatgaggaagaagacacagtcagctgtgacttgttcgtcttcgactcggagaagatggtaatgcagtgctcgggactctcattccatgaggtcagcaacaatgttctggacagacttcttggaaaggcatcaccgcctgtgaagcaagtttcccaccagaaggcgccagtgcttgtgcccgcagagtcaaaaccggccctgaaagctgctgtcgaggcggctcccaaggcgcctgagcctgtgaagacagaggtgaagaagatctcttcgtcggagagcgaattgttccacactattcttgaaagcatcgccaaggagactggcactcaggtctctgacttcactgatgacatggaactggctgaacttggcgttgattccatcatgggtattgagatcgctgccggcgtcagcagcagaaccggcctcgatgttctcctcccctcttttgtcgtagattatcccaccattggagatctgcgaaacgaatttgcgcgctcctctacatctacacctcccagcaagaccttttccgagttctccatcgtcgatgccactccagagtctacgcgcagctcgagtcgagcgccttctgagaagaaggagcctgctccggcttcagagaagtctgaggagctggtgatcgttccgtccgcggttgtcgaggattcctctcccctccccagtgccagaatcaccttgatccagggtcgatcttcgagtggaaagcagcctttctacttgatcgccgatggagctggtagcattgctacgtatatccacctggctcccttcaaggacaagagaccggtttatggcattgattcgcctttcctccgttgccccagcaggctgaccacccaggtgggcattgaaggcgtcgcaaagatcatctttgaggcgttgattaagtgccagcctgagggtccctttgacttgggaggattctctggcggagctatgctcagctatgaggtgtctcgccaactcgctgccgccggtcgcgtcgtctccagtcttctcctcatcgatatgtgttctccccgtcctttgggtgttgaggacacaatcgaggtcggctggaaggtctacgagaccatcgcttcccaagataagctctggaacgcctcaagtaacacccagcagcatctcaaggccgtcttcgcctgcgtcgcagcctaccaccctcctcccatgactcccgctcaacgacccaagcgaacagctatcatctgggctaaaaagggcatggtcgaccgttgttctcgcgacgagaaggtgatgaagttcctggccgacaagggcatccccaccgagtcgtacccagggttcatggaggaccccaagctgggtgccgtggcgtggggccttccgcacaagtccgctgcggacttgggacccaacggatgggacaagttccttggcgagactctgtgcctgtctatcgattcggaccacttggatatgccgatgccggggcatgtgcacttgcttcaggcggcgatggaggagtcgttcaaatatttcagcgaggcaaattag

SEQ ID NO: 65 - DNA, 14802 bp, Artificial Sequence
  Description of Artificial Sequence: Synthetic polynucleotide
tatctaaaaattgccttatgatccgtctctccggttacagcctgtgtaactgattaatcctgcctttctaatcaccattctaatgttttaattaagggattttgtcttcattaacggctttcgctcataaaaatgttatgacgttttgcccgcaggcgggaaaccatccacttcacgagactgatctcctctgccggaacaccgggcatctccaacttataagttggagaaataagagaatttcagattgagagaatgaaaaaaaaaaaaaaaaaaaaggcagaggagagcatagaaatggggttcactttttggtaaagctatagcatgcctatcacatataaatagagtgccagtagcgacttttttcacactcgaaatactcttactactgctctcttgttgtttttatcacttcttgtttcttcttggtaaatagaatatcaagctacaaaaagcatacaatcaactatcaactattaactatatcgtaatacacaatgctgggattcccaatgttcaacccagctacgcctgatgtctggaagatgaataccccttactttccatttgttacaccggggttatttcctgcctcagcacccccatcgcccaccaacgtagatgccgaagctgccagttcccaacagtcggaagcaagctatctggataaggagaaaattgttcgagggccacttgattatcttctcaaatcccctggaaaagacattcgtcggaaattcattcacgcgttcaatgaatggctgcgcattcctgaggacaagttgaatattatcacggaaattgttggattgcttcacacggcctcccttctaatcgacgatattcaggacaattccaagcttcgacgcggcctcccagtggcccatagcatatttggtattgcgcagacaattaactctgccaattatgcgtactttctagcccaggaaaggctccgcgaactgaatcatcctgaagcgtacgaaatatacacagaggaactgcttcgtctgcaccgcggtcaaggtatggacttgtactggcgggactgcctaacctgtcccacagaggaggactatattgagatgatcgccaacaagactggtggcctatttcgactggcgattaagcttatgcagttggaaagcactttgtgcagcaatgtcattgaactagcagacttgttgggcgtgatctttcagattcgggatgattaccaaaacttacagagtggactatacgccaagaacaagggattttgcgaggatttgacggagggaaaattttcctttctgattatccacagtattaacagtaacccgaacaatcaccatctgctaaatatactacggcagcggagcgaggacgattcggtgaagaagtatgctgttgattatatcgactcgacggggagttttgactactgccgggaacggctcgcttccttattggaagaggcggatcaaatggttaagaagttggaaaatgaggggggacaatcaaaggggatctacgatattctgagctttctgtcgtgagcggatctcttatgtctttacgatttatagttttcattatcaagtatgcctatattagtatatagcatctttagatgacagtgttcgaagtttcacgaataaaagataatattctactttttgctcccaccgcgtttgctagcacgagtgaacaccatccctcgcctgtgagttgtacccattcctctaaactgtagacatggtagcttcagcagtgttcgttatgtacggcatcctccaacaaacagtcggttatagtttgtcctgctcctctgaatcgtctccctcgatatttctcattttccttcgcatgccagcattgaaatgatcgaagttcaatgatgaaacggtaattcttctgtcatttactcatctcatctcatcaagttatataattctatacggatgtaatttttcacttttcgtcttgacgtccaccctataatttcaattattgaaccctcacgatccagttctccagtgacacagcctttatctggtcaaacctttctttctaatcacctatgctgatgcttaattaagggatttttgtctccatcaacggcatgcgcccaaaaatgacgttttttttaacccatagacacgaaactacccattttccaccggcctgacctaccaccggaacaacggccatctccaacttgcaagttggggaaattaagagcatcgcaggtttaatggaagaaaaaaaaaaggtacagcacagcgcaaatggagttagttcccttatgtcacacactcacacacagtcggtcagatcaagcatactgggtgcgtataaatagagtggccattgccaccctgtttatctcaaaatctgtcttgttagtggtcttctccctttttcaggttacaattctcttgtttctacttagtatataagtatatcaagctatattaagcatactatcaactgtcaactctatcctcaaaatacaatacaaaatggatgggttcgaccattctactgctccaccaggatataacgagctaaaatggctcgccgatatcttcgtcatcggaatggctgttggctgggttgctcactatatggagatgattcacacgtcgttcaaggaccaaacatactgcatgaccatcgggggcctttgcatcaattttgcctgggaaatcatattctgcacaatgtatcctgccaaaggatttgtcgagcgggttgcctttctcatgggcatttctctcgaccttggggttatttacgcgggaatcaagaacgccccaaatgaatggcaccactctgcaatggtgagggaccatatgccccttgtcttcgcagcaacgacactttgttgtctgagcggtcatatggctcttactgcccaggttggtcccgcacaagcctatacgtggggggcaattgcatgccagctctttatcagcatagggaatgtgtttcaattgttgagtcggggaaacacacgaggggcgtcatggacgctatggacctccaggttttttggatcaacatcagccattggctttgctcttgttcgatatattcgctggtgggaggccttttcttggttgaactgcccgcttgtgatatggtccgtggccatgttctttctgtttgaaacactctatggagccctattctattctgtcaagcgacaagaagggagatcccagcgtggaatcaagcacaaagagaggtagacaaatcgctcttaaatatatacctaaagaacattaaagctatattataagcaaagatacgtaaattttgcttatattattatacacatatcatatttctatatttttaagatttggttatataatgtacgtaatgcaaaggaaataaattttatacattattgaacagcgtccaagtaactacattatgtgcactaatagtttagcgtcgtgaagactttattgtgtcgcgaaaagtaaaaattttaaaaattagagcaccttgaacttgcgaaaaaggttctcatcaactgtttaaaaggaggatatcaggtcctatttctgacaaacaatatacaaatttagtttcaaagatgaatcagtgcgcgaaggacataactcaataggaaaaaaccgagcttcctttcatccggcgcggctgtgttctacatatcactgaagctccgggtattttaagttatacaagggaaagatgccggctagactagcaagttttaggctgcttaacattatggataggcggataaagggcccaaacaggattgtaaagcttagacgcttctggttggacaatggtacgtttgtgtattaagtaaggcttggctggggatagcaacattgggcagagtatagaagaccacaaaaaaaaggtatataagggcagagaagtctttgtaatgtgtgtaacttctcttccatgtgtaatcagtatttctacttacttcttaaatatacagaagtaagacagataaccaacagcctttcccagatatacatatatatctttatttcagcttaaacaataattatatttgtttaactcaaaaataaaaaaaaaaaaccaaactcacgcaactaattattccataataaaataacaacatggcggcacttccggacgttgcctccattcccatccctctggtggcaaccctaggcattgcccctctaattttctatctcgtccttgatagaattagccccttgtggccaaattccaaagctttcctgattggcaagaagaaaccggagaccgtgacatcgttcgagtgcccatatgcctacatccgtcagatctatgggaagtatcactgggagccattcgtacagaagctgtctccgaggcttaaggatgaggatccggccaaatataagatggttctggagataatggatgcaatccacctgtgtctgatgctagttgacgatataactgacaatagcgactatcgaaaaggcaagccagcagcccaccggatatatggcccttcagagacagcaaatcgcgcttactaccgagtcacccagattctaaacaagaccgtgcaaaagttccccaagctggccaagttcctgcttcagaatctggaagaaattctcgaaggccaagacctgtcactaatctggcgacgggatggactgggtagcctttcgactgttcctgatgagcgagttgcagcctatcgcaagatggcgtcattgaaaactggggcgttattccggctgctggggcaattggtgatggaggaccaatcgatggacgggacgatgactactcttgcgtggtgctctcagctgcagaatgactgcaagaatgtctactcatctgaatatgctaaggccaaaggggcgcttgccgaagacctccgaaatcgagagctctcatttccaattatcctcgcgctggaagctcctgaagggcattgggtcgccagtgctttggagaccagctcaccgcgcaacattcgcaaggcgcttgctgtgattcagagtgagagagtgcgcaatgcttgtttcaaggagctcaagtcggcgagtgcttcggtccaggactggttggctatttggggacggaacgagaaaatgaacttgaagagccagcagacgtagagtgcttttaactaagaattattagtcttttctgcttattttttcatcatagtttagaacactttatattaacgaatagtttatgaatctatttaggtttaaaaattgatacagttttataagttactttttcaaagactcgtgctgtctattgcataatgcactggaaggggaaaaaaaaggtgcacacgcgtggctttttcttgaatttgcagtttgaaaaataactacatggatgataagaaaacatggagtacagtcactttgagaaccttcaatcagctggtaacgtcttcgttaattggatactcaaaaaagatggatagcatgaatcacaagatggaaggaaatgcgggccacgaccacagtgatatgcatatgggagatggagatgatacctccattgggccgatgaagttagtcgacggatagaagcggttgtcccctttcccggcgagccggcagtcgggccgaggttcggataaattttgtattgtgttttgattctgtcatgagtattacttatgttctctttaggtaaccccaggttaatcaatcacagtttcataccggctagtattcaaattatgacttttcttctgcagtgtcagccttacgacgattatctatgagctttgaatatagtttgccgtgattcgtatctttaattggataataaaatgcgaaggatcgatgacccttattattatttttctacactggctaccgatttaactcatcttcttgaaagtatataagtaacagtaaaatataccgtacttctgctaatgttatttgtcccttatttttcttttcttgtcttatgctatagtacctaagaataacgactattgttttgaactaaacaaagtagtaaaagcacataaaagaattaagaaaatggccaatgcccagcaacccccctttcgcatccttattgtgggcggttctgtcgcaggcctcatccttgcgcactgtctcgaacgcgccaatatagagtacctcatactcgaaaaaggagaagatgttgctccacaagttggtgcctcgataggtatcatgccaaatggcggacggatcctcgagcaactgggcctatttggggagattgagcgtgtgatcgagccgttgcatcaggcgaatatcagctatccagatgggttctgctttagtaacgtctatcctaaggttcttggcgacaggttcggatacccggttgcattcttggaccggcagaagttcctgcagattgcatatgaggggctgagaaagaagcagaatgttctcaccggtaaaagggtagttggactgcgacagtcggatcaagggactgctgtttctgtggctgacgggacagagtatgaggcggatctcgtggttggtgctgatggagtacatagtcgggtgagaagtgagatttggaagatggcggaagagaatcagcctgcatcagtttcgacacgtgaaagaagaagcatgactgttgaatatgtctgcgttttcgggatttcatcagccatcccagggctcgagataagcgaacagatcaacggtattttcgaccatctatccattctaacaatccatggcagacatggtcgcgtgttctggttcgtgatccagaagctggataggaagtacgtctatcctgatgtcccgcgattctcagacgaggatgccgtacagctcttcgatcgggtcaaacacgtgcggttctggaaaaacatctgtgtgggggacttgtggaagaacagagaggtgtcctcgatgacagcgctggaggagggagtgttcgagacatggcatcatgataggatggttttgattggagatagcgttcacaagatgacgcccaactttggccaaggagctaattcagccatcgaggatgctgccgcgctctcttcccttctacatgatctcgtcaacgcccgtggagtttgcaagccatcgaatgtccagattcagcatctcctcaagcagtatcgggagacccgatacactcgcatggtaggcatgtgtcgcaccgcggcttcagtctctcggattcaggcccgagatggcatcctcaacaccgtctttggacgatattgggcaccttatgctggcaacctgcctgctgacctggcatcaaaagtgatggcagatgcagaggttgttacttttctgcccttgccagggcgctcaggaccgggctgggagatgtacagacgaaaggggaagggagggcaggtgcaatgggtgcttataatcttaagcttacttacgattggtggattgtgcatctggctacaaagcaatgcgttgagtagataaggagattgataagacttttctagttgcatatcttttatatttaaatcttatctattagttaattttttgtaatttatccttatatatagtctggttattctaaaatatcatttcagtatctaaaaattcccctcttttttcagttatatcttaacaggcgacagtccaaatgttgatttatcccagtccgattcatcagggttgtgaagcattttgtcaatggtcgaaatcacatcagtaatagtgcctcttacttgcctcatagaatttctttctcttaacgtcaccgtttggtcttttatagtttcgaaatctatggtgataccaaatggtgttcccaattcatcgttacgggcgtattttttaccaattgaagtattggaatcgtcaattttaaagtatatctctcttttacgtaaagcctgcgagatcctcttaagtatagcggggaagccatcgttattcgatattgtcgtaacaaatactttgatcggcgctatgcggccgccaccgcggtggagctccagcttttgttccctttagtgagggttaattgcgcgcttggcgtaatcatggtcatagctgtttcctgtgtgaaattgttatccgctcacaattccacacaacataggagccggaagcataaagtgtaaagcctggggtgcctaatgagtgaggtaactcacattaattgcgttgcgctcactgcccgctttccagtcgggaaacctgtcgtgccagctgcattaatgaatcggccaacgcgcggggagaggcggtttgcgtattgggcgctcttccgcttcctcgctcactgactcgctgcgctcggtcgttcggctgcggcgagcggtatcagctcactcaaaggcggtaatacggttatccacagaatcaggggataacgcaggaaagaacatgtgagcaaaaggccagcaaaaggccaggaaccgtaaaaaggccgcgttgctggcgtttttccataggctccgcccccctgacgagcatcacaaaaatcgacgctcaagtcagaggtggcgaaacccgacaggactataaagataccaggcgtttccccctggaagctccctcgtgcgctctcctgttccgaccctgccgcttaccggatacctgtccgcctttctcccttcgggaagcgtggcgctttctcatagctcacgctgtaggtatctcagttcggtgtaggtcgttcgctccaagctgggctgtgtgcacgaaccccccgttcagcccgaccgctgcgccttatccggtaactatcgtcttgagtccaacccggtaagacacgacttatcgccactggcagcagccactggtaacaggattagcagagcgaggtatgtaggcggtgctacagagttcttgaagtggtggcctaactacggctacactagaaggacagtatttggtatctgcgctctgctgaagccagttaccttcggaaaaagagttggtagctcttgatccggcaaacaaaccaccgctggtagcggtggtttttttgtttgcaagcagcagattacgcgcagaaaaaaaggatctcaagaagatcctttgatcttttctacggggtctgacgctcagtggaacgaaaactcacgttaagggattttggtcatgagattatcaaaaaggatcttcacctagatccttttaaattaaaaatgaagttttaaatcaatctaaagtatatatgagtaaacttggtctgacagttaccaatgcttaatcagtgaggcacctatctcagcgatctgtctatttcgttcatccatagttgcctgactccccgtcgtgtagataactacgatacgggagggcttaccatctggccccagtgctgcaatgataccgcgagacccacgctcaccggctccagatttatcagcaataaaccagccagccggaagggccgagcgcagaagtggtcctgcaactttatccgcctccatccagtctattaattgttgccgggaagctagagtaagtagttcgccagttaatagtttgcgcaacgttgttgccattgctacaggcatcgtggtgtcacgctcgtcgtttggtatggcttcattcagctccggttcccaacgatcaaggcgagttacatgatcccccatgttgtgcaaaaaagcggttagctccttcggtcctccgatcgttgtcagaagtaagttggccgcagtgttatcactcatggttatggcagcactgcataattctcttactgtcatgccatccgtaagatgcttttctgtgactggtgagtactcaaccaagtcattctgagaatagtgtatgcggcgaccgagttgctcttgcccggcgtcaatacgggataataccgcgccacatagcagaactttaaaagtgctcatcattggaaaacgttcttcggggcgaaaactctcaaggatcttaccgctgttgagatccagttcgatgtaacccactcgtgcacccaactgatcttcagcatcttttactttcaccagcgtttctgggtgagcaaaaacaggaaggcaaaatgccgcaaaaaagggaataagggcgacacggaaatgttgaatactcatactcttcctttttcaatattattgaagcatttatcagggttattgtctcatgagcggatacatatttgaatgtatttagaaaaataaacaaataggggttccgcgcacatttccccgaaaagtgccacctgaacgaagcatctgtgcttcattttgtagaacaaaaatgcaacgcgagagcgctaatttttcaaacaaagaatctgagctgcatttttacagaacagaaatgcaacgcgaaagcgctattttaccaacgaagaatctgtgcttcatttttgtaaaacaaaaatgcaacgcgagagcgctaatttttcaaacaaagaatctgagctgcatttttacagaacagaaatgcaacgcgagagcgctattttaccaacaaagaatctatacttcttttttgttctacaaaaatgcatcccgagagcgctatttttctaacaaagcatcttagattactttttttctcctttgtgcgctctataatgcagtctcttgataactttttgcactgtaggtccgttaaggttagaagaaggctactttggtgtctattttctcttccataaaaaaagcctgactccacttcccgcgtttactgattactagcgaagctgcgggtgcattttttcaagataaaggcatccccgattatattctataccgatgtggattgcgcatactttgtgaacagaaagtgatagcgttgatgattcttcattggtcagaaaattatgaacggtttcttctattttgtctctatatactacgtataggaaatgtttacattttcgtattgttttcgattcactctatgaatagttcttactacaatttttttgtctaaagagtaatactagagataaacataaaaaatgtagaggtcgagtttagatgcaagttcaaggagcgaaaggtggatgggtaggttatatagggatatagcacagagatatatagcaaagagatacttttgagcaatgtttgtggaagcggtattcgcaatattttagtagctcgttacagtccggtgcgtttttggttttttgaaagtgcgtcttcagagcgcttttggttttcaaaagcgctctgaagttcctatactttctagagaataggaacttcggaataggaacttcaaagcgtttccgaaaacgagcgcttccgaaaatgcaacgcgagctgcgcacatacagctcactgttcacgtcgcacctatatctgcgtgttgcctgtatatatatatacatgagaagaacggcatagtgcgtgtttatgcttaaatgcgtacttatatgcgtctatttatgtaggatgaaaggtagtctagtacctcctgtgatattatcccattccatgcggggtatcgtatgcttccttcagcactaccctttagctgttctatatgctgccactcctcaattggattagtctcatccttcaatgctatcatttcctttgatattggatcatactaagaaaccattattatcatgacattaacctataaaaataggcgtatcacgaggccctttcgtctcgcgcgtttcggtgatgacggtgaaaacctctgacacatgcagctcccggagacggtcacagcttgtctgtaagcggatgccgggagcagacaagcccgtcagggcgcgtcagcgggtgttggcgggtgtcggggctggcttaactatgcggcatcagagcagattgtactgagagtgcaccatatcgactacgtcgtaaggccgtttctgacagagtaaaattcttgagggaactttcaccattatgggaaatgcttcaagaaggtattgacttaaactccatcaaatggtcaggtcattgagtgttttttatttgttgtatttttttttttttagagaaaatcctccaatatcaaattaggaatcgtagtttcatgattttctgttacacctaactttttgtgtggtgccctcctccttgtcaatattaatgttaaagtgcaattctttttccttatcacgttgagccattagtatcaatttgcttacctgtattcctttactatcctcctttttctccttcttgataaatgtatgtagattgcgtatatagtttcgtctaccctatgaacatattccattttgtaatttcgtgtcgtttctattatgaatttcatttataaagtttatgtacaaatatcataaaaaaagagaatctttttaagcaaggattttcttaacttcttcggcgacagcatcaccgacttcggtggtactgttggaaccacctaaatcaccagttctgatacctgcatccaaaacctttttaactgcatcttcaatggccttaccttcttcaggcaagttcaatgacaatttcaacatcattgcagcagacaagatagtggcgatagggtcaaccttattctttggcaaatctggagcagaaccgtggcatggttcgtacaaaccaaatgcggtgttcttgtctggcaaagaggccaaggacgcagatggcaacaaacccaaggaacctgggataacggaggcttcatcggagatgatatcaccaaacatgttgctggtgattataataccatttaggtgggttgggttcttaactaggatcatggcggcagaatcaatcaattgatgttgaaccttcaatgtagggaattcgttcttgatggtttcctccacagtttttctccataatcttgaagaggccaaaagattagctttatccaaggaccaaataggcaatggtggctcatgttgtagggccatgaaagcggccattcttgtgattctttgcacttctggaacggtgtattgttcactatcccaagcgacaccatcaccatcgtcttcctttctcttaccaaagtaaatacctcccactaattctctgacaacaacgaagtcagtacctttagcaaattgtggcttgattggagataagtctaaaagagagtcggatgcaaagttacatggtcttaagttggcgtacaattgaagttctttacggatttttagtaaaccttgttcaggtctaacactaccggtaccccatttaggaccagccacagcacctaacaaaacggcatcaaccttcttggaggcttccagcgcctcatctggaagtgggacacctgtagcatcgatagcagcaccaccaattaaatgattttcgaaatcgaacttgacattggaacgaacatcagaaatagctttaagaaccttaatggcttcggctgtgatttcttgaccaacgtggtcacctggcaaaacgacgatcttcttaggggcagacataggggcagacattagaatggtatatccttgaaatatatatatatattgctgaaatgtaaaaggtaagaaaagttagaaagtaagacgattgctaaccacctattggaaaaaacaataggtccttaaataatattgtcaacttcaagtattgtgatgcaagcatttagtcatgaacgcttctctattctatatgaaaagccggttccggcctctcacctttcctttttctcccaatttttcagttgaaaaaggtatatgcgtcaggcgacctctgaaattaacaaaaaatttccagtcatcgaatttgattctgtgcgatagcgcccctgtgtgttctcgttatgttgaggaaaaaaataatggttgctaagagattcgaactcttgcatcttacgatacctgagtattcccacagttaactgcggtcaagatatttcttgaatcaggcgccttagaccgctcggccaaacaaccaattacttgttgagaaatagagtataattatcctataaatataacgtttttgaacacacatgaacaaggaagtacaggacaattgattttgaagagaatgtggattttgatgtaattgttgggattccatttttaataaggcaataatattaggtatgtggatatactagaagttctcctcgaccgtcgatatgcggtgtgaaataccgcacagatgcgtaaggagaaaataccgcatcaggaaattgtaaacgttaatattttgttaaaattcgcgttaaatttttgttaaatcagctcattttttaaccaataggccgaaatcggcaaaatcccttataaatcaaaagaatagaccgagatagggttgagtgttgttccagtttggaacaagagtccactattaaagaacgtggactccaacgtcaaagggcgaaaaaccgtctatcagggcgatggcccactacgtgaaccatcaccctaatcaagttttttggggtcgaggtgccgtaaagcactaaatcggaaccctaaagggagcccccgatttagagcttgacggggaaagccggcgaacgtggcgagaaaggaagggaagaaagcgaaaggagcgggcgctagggcgctggcaagtgtagcggtcacgctgcgcgtaaccaccacacccgccgcgcttaatgcgccgctacagggcgcgtcgcgccattcgccattcaggctgcgcaactgttgggaagggcgatcggtgcgggcctcttcgctattacgccagctggcgaaagggggatgtgctgcaaggcgattaagttgggtaacgccagggttttcccagtcacgacgttgtaaaacgacggccagtgagcgcgcgtaatacgactcactatagggcgaattgggtaccgggccccccctcgaggtcgacggtatcgataagcttgatatcgaattcctgcagcccgggggatccactagttctagattaattaa

SEQ ID NO: 66 - DNA, 14644 bp, Artificial Sequence
  Description of Artificial Sequence: Synthetic polynucleotide
atagcttcaaaatgtttctactccttttttactcttccagattttctcggactccgcgcatcgccgtaccacttcaaaacacccaagcacagcatactaaatttcccctctttcttcctctagggtgtcgttaattacccgtactaaaggtttggaaaagaaaaaagagaccgcctcgtttctttttcttcgtcgaaaaaggcaataaaaatttttatcacgtttctttttcttgaaaatttttttttttgatttttttctctttcgatgacctcccattgatatttaagttaataaacggtcttcaatttctcaagtttcagtttcatttttcttgttctattacaactttttttacttcttgctcattagaaagaaagcatagcaatctaatctaagttttaattacaaaatgctgggattcccaatgttcaacccagctacgcctgatgtctggaagatgaataccccttactttccatttgttacaccggggttatttcctgcctcagcacccccatcgcccaccaacgtagatgccgaagctgccagttcccaacagtcggaagcaagctatctggataaggagaaaattgttcgagggccacttgattatcttctcaaatcccctggaaaagacattcgtcggaaattcattcacgcgttcaatgaatggctgcgcattcctgaggacaagttgaatattatcacggaaattgttggattgcttcacacggcctcccttctaatcgacgatattcaggacaattccaagcttcgacgcggcctcccagtggcccatagcatatttggtattgcgcagacaattaactctgccaattatgcgtactttctagcccaggaaaggctccgcgaactgaatcatcctgaagcgtacgaaatatacacagaggaactgcttcgtctgcaccgcggtcaaggtatggacttgtactggcgggactgcctaacctgtcccacagaggaggactatattgagatgatcgccaacaagactggtggcctatttcgactggcgattaagcttatgcagttggaaagcactttgtgcagcaatgtcattgaactagcagacttgttgggcgtgatctttcagattcgggatgattaccaaaacttacagagtggactatacgccaagaacaagggattttgcgaggatttgacggagggaaaattttcctttctgattatccacagtattaacagtaacccgaacaatcaccatctgctaaatatactacggcagcggagcgaggacgattcggtgaagaagtatgctgttgattatatcgactcgacggggagttttgactactgccgggaacggctcgcttccttattggaagaggcggatcaaatggttaagaagttggaaaatgaggggggacaatcaaaggggatctacgatattctgagctttctgtcgtgagcggatctcttatgtctttacgatttatagttttcattatcaagtatgcctatattagtatatagcatctttagatgacagtgttcgaagtttcacgaataaaagataatattctactttttgctcccaccgcgtttgctagcacgagtgaacaccatccctcgcctgtgagttgtacccattcctctaaactgtagacatggtagcttcagcagtgttcgttatgtacggcatcctccaacaaacagtcggttatagtttgtcctgctcctctgaatcgtctccctcgatatttctcattttccttcgcatgccagcattgaaatgatcgaagttcaatgatgaaacggtaattcttctgtcatttactcatctcatctcatcaagttatataattctatacggatgtaatttttcacttttcgtcttgacgtccaccctataatttcaattattgaaccctcactgggtcattacgtaaataatgataggaatgggattcttctatttttcctttttccattctagcagccgtcgggaaaacgtggcatcctctctttcgggctcaattggagtcacgctgccgtgagcatcctctctttccatatctaacaactgagcacgtaaccaatggaaaagcatgagcttagcgttgctccaaaaaagtattggatggttaataccatttgtctgttctcttctgactttgactcctcaaaaaaaaaaaatctacaatcaacagatcgcttcaattacgccctcacaaaaacttttttccttcttcttcgcccacgttaaattttatccctcatgttgtctaacggatttctgcacttgatttattataaaaagacaaagacataatacttctctatcaatttcagttattgttcttccttgcgttattcttctgttcttctttttcttttgtcatatataaccataaccaagtaatacatattcaaaatggatgggttcgaccattctactgctccaccaggatataacgagctaaaatggctcgccgatatcttcgtcatcggaatggctgttggctgggttgctcactatatggagatgattcacacgtcgttcaaggaccaaacatactgcatgaccatcgggggcctttgcatcaattttgcctgggaaatcatattctgcacaatgtatcctgccaaaggatttgtcgagcgggttgcctttctcatgggcatttctctcgaccttggggttatttacgcgggaatcaagaacgccccaaatgaatggcaccactctgcaatggtgagggaccatatgccccttgtcttcgcagcaacgacactttgttgtctgagcggtcatatggctcttactgcccaggttggtcccgcacaagcctatacgtggggggcaattgcatgccagctctttatcagcatagggaatgtgtttcaattgttgagtcggggaaacacacgaggggcgtcatggacgctatggacctccaggttttttggatcaacatcagccattggctttgctcttgttcgatatattcgctggtgggaggccttttcttggttgaactgcccgcttgtgatatggtccgtggccatgttctttctgtttgaaacactctatggagccctattctattctgtcaagcgacaagaagggagatcccagcgtggaatcaagcacaaagagaggtagacaaatcgctcttaaatatatacctaaagaacattaaagctatattataagcaaagatacgtaaattttgcttatattattatacacatatcatatttctatatttttaagatttggttatataatgtacgtaatgcaaaggaaataaattttatacattattgaacagcgtccaagtaactacattatgtgcactaatagtttagcgtcgtgaagactttattgtgtcgcgaaaagtaaaaattttaaaaattagagcaccttgaacttgcgaaaaaggttctcatcaactgtttaaaaggaggatatcaggtcctatttctgacaaacaatatacaaatttagtttcaaagatgaatcagtgcgcgaaggacataactcaacagtttattcctggcatccactaaatataatggagcccgctttttaagctggcatccagaaaaaaaaagaatcccagcaccaaaatattgttttcttcaccaaccatcagttcataggtccattctcttagcgcaactacagagaacaggggcacaaacaggcaaaaaacgggcacaacctcaatggagtgatgcaacctgcctggagtaaatgatgacacaaggcaattgacccacgcatgtatctatctcattttcttacaccttctattaccttctgctctctctgatttggaaaaagctgaaaaaaaaggttgaaaccagttccctgaaattattcccctacttgactaataagtatataaagacggtaggtattgattgtaattctgtaaatctatttcttaaacttcttaaattctacttttatagttagtcttttttttagttttaaaacaccaagaacttagtttcgaataaacacacataaacaaacaaaatggcggcacttccggacgttgcctccattcccatccctctggtggcaaccctaggcattgcccctctaattttctatctcgtccttgatagaattagccccttgtggccaaattccaaagctttcctgattggcaagaagaaaccggagaccgtgacatcgttcgagtgcccatatgcctacatccgtcagatctatgggaagtatcactgggagccattcgtacagaagctgtctccgaggcttaaggatgaggatccggccaaatataagatggttctggagataatggatgcaatccacctgtgtctgatgctagttgacgatataactgacaatagcgactatcgaaaaggcaagccagcagcccaccggatatatggcccttcagagacagcaaatcgcgcttactaccgagtcacccagattctaaacaagaccgtgcaaaagttccccaagctggccaagttcctgcttcagaatctggaagaaattctcgaaggccaagacctgtcactaatctggcgacgggatggactgggtagcctttcgactgttcctgatgagcgagttgcagcctatcgcaagatggcgtcattgaaaactggggcgttattccggctgctggggcaattggtgatggaggaccaatcgatggacgggacgatgactactcttgcgtggtgctctcagctgcagaatgactgcaagaatgtctactcatctgaatatgctaaggccaaaggggcgcttgccgaagacctccgaaatcgagagctctcatttccaattatcctcgcgctggaagctcctgaagggcattgggtcgccagtgctttggagaccagctcaccgcgcaacattcgcaaggcgcttgctgtgattcagagtgagagagtgcgcaatgcttgtttcaaggagctcaagtcggcgagtgcttcggtccaggactggttggctatttggggacggaacgagaaaatgaacttgaagagccagcagacgtagagtgcttttaactaagaattattagtcttttctgcttattttttcatcatagtttagaacactttatattaacgaatagtttatgaatctatttaggtttaaaaattgatacagttttataagttactttttcaaagactcgtgctgtctattgcataatgcactggaaggggaaaaaaaaggtgcacacgcgtggctttttcttgaatttgcagtttgaaaaataactacatggatgataagaaaacatggagtacagtcactttgagaaccttcaatcagctggtaacgtcttcgttaattggatactcaaaaaagatggatagcatgaatcacaagatggaaggaaatgcgggccacgaccacagtgatatgcatatgggagatggagatgataccttatatctaggaacccatcaggttggtggaagattacccgttctaagacttttcagcttcctctattgatgttacacctggacaccccttttctggcatccagtttttaatcttcagtggcatgtgagattctccgaaattaattaaagcaatcacacaattctctcggataccacctcggttgaaactgacaggtggtttgttacgcatgctaatgcaaaggagcctatatacctttggctcggctgctgtaacagggaatataaagggcagcataatttaggagtttagtgaacttgcaacatttactattttcccttcttacgtaaatatttttctttttaattctaaatcaatctttttcaattttttgtttgtattcttttcttgcttaaatctataactacaaaaaacacatacataaactaaaaatggccaatgcccagcaacccccctttcgcatccttattgtgggcggttctgtcgcaggcctcatccttgcgcactgtctcgaacgcgccaatatagagtacctcatactcgaaaaaggagaagatgttgctccacaagttggtgcctcgataggtatcatgccaaatggcggacggatcctcgagcaactgggcctatttggggagattgagcgtgtgatcgagccgttgcatcaggcgaatatcagctatccagatgggttctgctttagtaacgtctatcctaaggttcttggcgacaggttcggatacccggttgcattcttggaccggcagaagttcctgcagattgcatatgaggggctgagaaagaagcagaatgttctcaccggtaaaagggtagttggactgcgacagtcggatcaagggactgctgtttctgtggctgacgggacagagtatgaggcggatctcgtggttggtgctgatggagtacatagtcgggtgagaagtgagatttggaagatggcggaagagaatcagcctgcatcagtttcgacacgtgaaagaagaagcatgactgttgaatatgtctgcgttttcgggatttcatcagccatcccagggctcgagataagcgaacagatcaacggtattttcgaccatctatccattctaacaatccatggcagacatggtcgcgtgttctggttcgtgatccagaagctggataggaagtacgtctatcctgatgtcccgcgattctcagacgaggatgccgtacagctcttcgatcgggtcaaacacgtgcggttctggaaaaacatctgtgtgggggacttgtggaagaacagagaggtgtcctcgatgacagcgctggaggagggagtgttcgagacatggcatcatgataggatggttttgattggagatagcgttcacaagatgacgcccaactttggccaaggagctaattcagccatcgaggatgctgccgcgctctcttcccttctacatgatctcgtcaacgcccgtggagtttgcaagccatcgaatgtccagattcagcatctcctcaagcagtatcgggagacccgatacactcgcatggtaggcatgtgtcgcaccgcggcttcagtctctcggattcaggcccgagatggcatcctcaacaccgtctttggacgatattgggcaccttatgctggcaacctgcctgctgacctggcatcaaaagtgatggcagatgcagaggttgttacttttctgcccttgccagggcgctcaggaccgggctgggagatgtacagacgaaaggggaagggagggcaggtgcaatgggtgcttataatcttaagcttacttacgattggtggattgtgcatctggctacaaagcaatgcgttgagtagataaggagattgataagacttttctagttgcatatcttttatatttaaatcttatctattagttaattttttgtaatttatccttatatatagtctggttattctaaaatatcatttcagtatctaaaaattcccctcttttttcagttatatcttaacaggcgacagtccaaatgttgatttatcccagtccgattcatcagggttgtgaagcattttgtcaatggtcgaaatcacatcagtaatagtgcctcttacttgcctcatagaatttctttctcttaacgtcaccgtttggtcttttatagtttcgaaatctatggtgataccaaatggtgttcccaattcatcgttacgggcgtattttttaccaattgaagtattggaatcgtcaattttaaagtatatctctcttttacgtaaagcctgcgagatcctcttaagtatagcggggaagccatcgttattcgatattgtcgtaacaaatactttgatcggcgctatgcggccgccaccgcggtggagctccagcttttgttccctttagtgagggttaattgcgcgcttggcgtaatcatggtcatagctgtttcctgtgtgaaattgttatccgctcacaattccacacaacataggagccggaagcataaagtgtaaagcctggggtgcctaatgagtgaggtaactcacattaattgcgttgcgctcactgcccgctttccagtcgggaaacctgtcgtgccagctgcattaatgaatcggccaacgcgcggggagaggcggtttgcgtattgggcgctcttccgcttcctcgctcactgactcgctgcgctcggtcgttcggctgcggcgagcggtatcagctcactcaaaggcggtaatacggttatccacagaatcaggggataacgcaggaaagaacatgtgagcaaaaggccagcaaaaggccaggaaccgtaaaaaggccgcgttgctggcgtttttccataggctccgcccccctgacgagcatcacaaaaatcgacgctcaagtcagaggtggcgaaacccgacaggactataaagataccaggcgtttccccctggaagctccctcgtgcgctctcctgttccgaccctgccgcttaccggatacctgtccgcctttctcccttcgggaagcgtggcgctttctcatagctcacgctgtaggtatctcagttcggtgtaggtcgttcgctccaagctgggctgtgtgcacgaaccccccgttcagcccgaccgctgcgccttatccggtaactatcgtcttgagtccaacccggtaagacacgacttatcgccactggcagcagccactggtaacaggattagcagagcgaggtatgtaggcggtgctacagagttcttgaagtggtggcctaactacggctacactagaaggacagtatttggtatctgcgctctgctgaagccagttaccttcggaaaaagagttggtagctcttgatccggcaaacaaaccaccgctggtagcggtggtttttttgtttgcaagcagcagattacgcgcagaaaaaaaggatctcaagaagatcctttgatcttttctacggggtctgacgctcagtggaacgaaaactcacgttaagggattttggtcatgagattatcaaaaaggatcttcacctagatccttttaaattaaaaatgaagttttaaatcaatctaaagtatatatgagtaaacttggtctgacagttaccaatgcttaatcagtgaggcacctatctcagcgatctgtctatttcgttcatccatagttgcctgactccccgtcgtgtagataactacgatacgggagggcttaccatctggccccagtgctgcaatgataccgcgagacccacgctcaccggctccagatttatcagcaataaaccagccagccggaagggccgagcgcagaagtggtcctgcaactttatccgcctccatccagtctattaattgttgccgggaagctagagtaagtagttcgccagttaatagtttgcgcaacgttgttgccattgctacaggcatcgtggtgtcacgctcgtcgtttggtatggcttcattcagctccggttcccaacgatcaaggcgagttacatgatcccccatgttgtgcaaaaaagcggttagctccttcggtcctccgatcgttgtcagaagtaagttggccgcagtgttatcactcatggttatggcagcactgcataattctcttactgtcatgccatccgtaagatgcttttctgtgactggtgagtactcaaccaagtcattctgagaatagtgtatgcggcgaccgagttgctcttgcccggcgtcaatacgggataataccgcgccacatagcagaactttaaaagtgctcatcattggaaaacgttcttcggggcgaaaactctcaaggatcttaccgctgttgagatccagttcgatgtaacccactcgtgcacccaactgatcttcagcatcttttactttcaccagcgtttctgggtgagcaaaaacaggaaggcaaaatgccgcaaaaaagggaataagggcgacacggaaatgttgaatactcatactcttcctttttcaatattattgaagcatttatcagggttattgtctcatgagcggatacatatttgaatgtatttagaaaaataaacaaataggggttccgcgcacatttccccgaaaagtgccacctgaacgaagcatctgtgcttcattttgtagaacaaaaatgcaacgcgagagcgctaatttttcaaacaaagaatctgagctgcatttttacagaacagaaatgcaacgcgaaagcgctattttaccaacgaagaatctgtgcttcatttttgtaaaacaaaaatgcaacgcgagagcgctaatttttcaaacaaagaatctgagctgcatttttacagaacagaaatgcaacgcgagagcgctattttaccaacaaagaatctatacttcttttttgttctacaaaaatgcatcccgagagcgctatttttctaacaaagcatcttagattactttttttctcctttgtgcgctctataatgcagtctcttgataactttttgcactgtaggtccgttaaggttagaagaaggctactttggtgtctattttctcttccataaaaaaagcctgactccacttcccgcgtttactgattactagcgaagctgcgggtgcattttttcaagataaaggcatccccgattatattctataccgatgtggattgcgcatactttgtgaacagaaagtgatagcgttgatgattcttcattggtcagaaaattatgaacggtttcttctattttgtctctatatactacgtataggaaatgtttacattttcgtattgttttcgattcactctatgaatagttcttactacaatttttttgtctaaagagtaatactagagataaacataaaaaatgtagaggtcgagtttagatgcaagttcaaggagcgaaaggtggatgggtaggttatatagggatatagcacagagatatatagcaaagagatacttttgagcaatgtttgtggaagcggtattcgcaatattttagtagctcgttacagtccggtgcgtttttggttttttgaaagtgcgtcttcagagcgcttttggttttcaaaagcgctctgaagttcctatactttctagagaataggaacttcggaataggaacttcaaagcgtttccgaaaacgagcgcttccgaaaatgcaacgcgagctgcgcacatacagctcactgttcacgtcgcacctatatctgcgtgttgcctgtatatatatatacatgagaagaacggcatagtgcgtgtttatgcttaaatgcgtacttatatgcgtctatttatgtaggatgaaaggtagtctagtacctcctgtgatattatcccattccatgcggggtatcgtatgcttccttcagcactaccctttagctgttctatatgctgccactcctcaattggattagtctcatccttcaatgctatcatttcctttgatattggatcatactaagaaaccattattatcatgacattaacctataaaaataggcgtatcacgaggccctttcgtctcgcgcgtttcggtgatgacggtgaaaacctctgacacatgcagctcccggagacggtcacagcttgtctgtaagcggatgccgggagcagacaagcccgtcagggcgcgtcagcgggtgttggcgggtgtcggggctggcttaactatgcggcatcagagcagattgtactgagagtgcaccatatcgactacgtcgtaaggccgtttctgacagagtaaaattcttgagggaactttcaccattatgggaaatgcttcaagaaggtattgacttaaactccatcaaatggtcaggtcattgagtgttttttatttgttgtatttttttttttttagagaaaatcctccaatatcaaattaggaatcgtagtttcatgattttctgttacacctaactttttgtgtggtgccctcctccttgtcaatattaatgttaaagtgcaattctttttccttatcacgttgagccattagtatcaatttgcttacctgtattcctttactatcctcctttttctccttcttgataaatgtatgtagattgcgtatatagtttcgtctaccctatgaacatattccattttgtaatttcgtgtcgtttctattatgaatttcatttataaagtttatgtacaaatatcataaaaaaagagaatctttttaagcaaggattttcttaacttcttcggcgacagcatcaccgacttcggtggtactgttggaaccacctaaatcaccagttctgatacctgcatccaaaacctttttaactgcatcttcaatggccttaccttcttcaggcaagttcaatgacaatttcaacatcattgcagcagacaagatagtggcgatagggtcaaccttattctttggcaaatctggagcagaaccgtggcatggttcgtacaaaccaaatgcggtgttcttgtctggcaaagaggccaaggacgcagatggcaacaaacccaaggaacctgggataacggaggcttcatcggagatgatatcaccaaacatgttgctggtgattataataccatttaggtgggttgggttcttaactaggatcatggcggcagaatcaatcaattgatgttgaaccttcaatgtagggaattcgttcttgatggtttcctccacagtttttctccataatcttgaagaggccaaaagattagctttatccaaggaccaaataggcaatggtggctcatgttgtagggccatgaaagcggccattcttgtgattctttgcacttctggaacggtgtattgttcactatcccaagcgacaccatcaccatcgtcttcctttctcttaccaaagtaaatacctcccactaattctctgacaacaacgaagtcagtacctttagcaaattgtggcttgattggagataagtctaaaagagagtcggatgcaaagttacatggtcttaagttggcgtacaattgaagttctttacggatttttagtaaaccttgttcaggtctaacactaccggtaccccatttaggaccagccacagcacctaacaaaacggcatcaaccttcttggaggcttccagcgcctcatctggaagtgggacacctgtagcatcgatagcagcaccaccaattaaatgattttcgaaatcgaacttgacattggaacgaacatcagaaatagctttaagaaccttaatggcttcggctgtgatttcttgaccaacgtggtcacctggcaaaacgacgatcttcttaggggcagacataggggcagacattagaatggtatatccttgaaatatatatatatattgctgaaatgtaaaaggtaagaaaagttagaaagtaagacgattgctaaccacctattggaaaaaacaataggtccttaaataatattgtcaacttcaagtattgtgatgcaagcatttagtcatgaacgcttctctattctatatgaaaagccggttccggcctctcacctttcctttttctcccaatttttcagttgaaaaaggtatatgcgtcaggcgacctctgaaattaacaaaaaatttccagtcatcgaatttgattctgtgcgatagcgcccctgtgtgttctcgttatgttgaggaaaaaaataatggttgctaagagattcgaactcttgcatcttacgatacctgagtattcccacagttaactgcggtcaagatatttcttgaatcaggcgccttagaccgctcggccaaacaaccaattacttgttgagaaatagagtataattatcctataaatataacgtttttgaacacacatgaacaaggaagtacaggacaattgattttgaagagaatgtggattttgatgtaattgttgggattccatttttaataaggcaataatattaggtatgtggatatactagaagttctcctcgaccgtcgatatgcggtgtgaaataccgcacagatgcgtaaggagaaaataccgcatcaggaaattgtaaacgttaatattttgttaaaattcgcgttaaatttttgttaaatcagctcattttttaaccaataggccgaaatcggcaaaatcccttataaatcaaaagaatagaccgagatagggttgagtgttgttccagtttggaacaagagtccactattaaagaacgtggactccaacgtcaaagggcgaaaaaccgtctatcagggcgatggcccactacgtgaaccatcaccctaatcaagttttttggggtcgaggtgccgtaaagcactaaatcggaaccctaaagggagcccccgatttagagcttgacggggaaagccggcgaacgtggcgagaaaggaagggaagaaagcgaaaggagcgggcgctagggcgctggcaagtgtagcggtcacgctgcgcgtaaccaccacacccgccgcgcttaatgcgccgctacagggcgcgtcgcgccattcgccattcaggctgcgcaactgttgggaagggcgatcggtgcgggcctcttcgctattacgccagctggcgaaagggggatgtgctgcaaggcgattaagttgggtaacgccagggttttcccagtcacgacgttgtaaaacgacggccagtgagcgcgcgtaatacgactcactatagggcgaattgggtaccgggccccccctcgaggtcgacggtatcgataagcttgatatcgaattcctgcagcccgggggatccactagttctagattaattaa

SEQ ID NO: 67 - DNA, 4275 bp, Aspergillus fumigatus
atggaagatcaaggtcacttgccatctgaaccaagagctctgtttgatagaagagatgataccgattctactaacactgccttggatgaaactgacttgtccagaactcccttgcaagatacttctcacactccacatgctgaagattggtctttgatgccagacttgaaaaagcaacatgacagaaacgttgcttccggctttaggaggagagaattgggtgttacctggaaaaatttgtctgtcgatgttgtttccgctgatgccgctattaacgagaacgtcttgtctcaattcaacattccacagcacatcagggagtctaggaacaaagctcccttgagaactattttgcacgaatctcatggttgtgtcaaaccaggtgaaatgttgttggttttgggtaggccaggctctggttgtactactttgttgagaatgttgtccaatcataggttgggctataaagccatcaggggcgatgttagatttggttccttgactccagaagaagcttccaagtataggggtcaaatcgtcatgaacaccgaagaagagttgtttttcccaactttgaccgttgctcaaaccttggatttcgccaccaggttgaaggttccatttaatttgcccgatggtgtcacttctccagaagctttcaggcaagaaacccgcgaatttttgttgaaatccatgggtatttctcacacctctgacactaaagttggcaatgagtacgttagaggtgtttccggcggtgaacgcaaaagagtttccatcattgaatgtttggctactaggggttccgttttttgttgggataattctactaggggtttggatgcttccactgctttggaatgggctaaagctgttagagctatgactgatgttttcggtttgtcctccatcgtcactttgtatcaggctggcaacggtatttacgatctgttcgacaaggttttggtcttggatgaaggtaagcaaatttactatggcccaatgtcccaagctagaccattcatggaagaacagggttttgtctgtagggagggttctaatgttgccgattttttgactggcgttactgtccccactgaaagaaaaattagaccaggctacgaaaatcgcttcccaagaaatgccgatgaattgttggctgcctacgaaaaatctcccattagagctcagatggctattgaatatgattaccccgatactgagtccactagagaacgcactgaagaattcaagctgggtgttttggacgagaaagccaaaaggttgtctaagaactccccattcactgtcgatttcttgcaacaagttaaggcctgcatcatccgccaatatcaaatcatctggactgataaggccacttttgccatcaagcaaatttccaccgtcattcaagctttggttgctggctctttgttctacaacgctccagataattccggcggtttgttcattaaatccggtgctttgttcttctctctgttgtataattctctgttggccatgtctgaggtcaccgactctttctctggccgcccagttctgattaaacacaaatattttgcctttttccacccagccgccttctgcatcgctcaaattgctgccgatattcccgtcttgttgttccaaatctctatgtttgccgtcgttgtttacttcatggttggtttgaccacctccgctggcgctttcttttcctattggatcattatctttgtcgctactatggttatgaccgctttgtttagggctatcggtgctttgttctctactttcgatggcgcttccaaggtttctggttttttgatctccgctttgatcatgtattgcggttatttggagccctatcatgctatgcatccctggttcatctggatctattggatcaatcccctggcttatgctttcgatgctctgttgtccatcgaatttcacaacaagattattccctgcgttggcaataatctggttccattcggtccaggttatgatgacaccacttttcaatcttgcgctggtgttggtggtgctgtcagaggtatgacttatgtcactggtgatcaatatctggcctctttgacttactcctactctcatgtttggagaaattttggtatcctatgggcttggtgggctttgttcgttgctgttactattattgctacttctagatggaaatctgctgctgaagctggtaactctttgttgattccaagggaaactgttgccaagcatcatgctgttgtcagaaaggatgaagaggctcaattgaatgaaaaggctggtcataaaggtactggtactgattctgaagcccaatctaacgttgatcaacacttggttaggaacacttccgtcttcacttggaaaaacctgacttacaccgttaaaactccatctggtgatagagtcttgctagacaatgtctatggttgggttaaaccaggtatgttgggtgctttgatgggttcttctggtgctggtaaaactactttgctggatgtcttggctcaaaggaaaactgacggtactattagaggttctattatggttgatggtaggccattgccagtctccttccagaggtctgctggttattgtgaacaattggatgttcatgaaccatttgctactgttagggaagctttggaattctccgccttgttgcgccaaccaagacatattccaagggaagaaaaactgaagtacgtcgatgttattattgacttgctggaattgcatgatctggaacacactctgatcggtagggttggtgccggcttgtctgttgaacaaagaaaaagagttactatcggcgtcgaattagtctccaagccatccattttgatttttctggatgaacccacttctggtttggacggtcaatccgctttcaacactgttaggttcttgagaaagttggctgatgttggtcaagctgttttggttactattcatcaaccctctgctcaattgttcgccgaattcgataccttgttgttgctggctaaaggtggtaagatggtttatttcggcgatattggtgataacgctcaaactgtcaaggactactttgccagatatggtgctccatgtccagctaatgtcaatccagctgaacatatgattgatgttgtttccggtcacttgtcccaaggtagagattggaatcaagtctggttggaatctccagaacattcttctgcctctagagaattggattccattatttctgaagctgcttctaaaccaccaggtactgttgatgatggttacgagttcgctatgccattgtgggaacagactaagatcgtcactcaaaggatgtccacttccctgtataggaactgtgattacattatgaacaagattgctctgcatatcggttctgctctgttcaacggcttctctttctggatgatcggtgactctgttgctgatatgcagttgaaattgttcaccatcttcaacttcatttttgtcgctccaggtgttatcaaccagctgcagccattgtttatcgagaggagggatatctatgatgccagagaaaaaaagtccaagatgtactcttgggtcgcttttgttaccgctttgattgtctccgaattcccatacttgtgcgtttgtgctgtcttgtatttcgtctgttggtattataccgtcggtttcccctctgattccgacaaggccggtgccattttctttattatgttgtgttacgagtttttgtacaccggcattggtcaattcatcgctgcttacgccccaaatgctacttttgctgctctgaccaatccattgattctgggtactttggtttctttttgcggtgtcttggtcccatatgctcaaattcaagctttttggcgctactggatctattggttgaacccctttaactacttgatgggttccatgttggttttttccgtctttgacaccgatgtcaaatgtaaggaaggtgaattcgccgtttttgatactccaaacggcactacttgtgccgattatttgtccacttatttgcaaggtgttggttctagagccaacttggttaatccagaagctacttctggttgtagggtctgccaatacagatatggctccgattatctgtacaccatcaatttgaaggattactactacggttggagagataccgctattgtctgcattttcgtcctgtcctcttatgctttggtctatgctctgatgaagttgagaactaaagcctctaaaaaagctgaatga

SEQ ID NO: 68 - DNA, 1830 bp, Aspergillus fumigatus
atgccatcttggactagaactccagcttgtttcagaagacaattttctaggttgccaggtccctctccattgtcctcttctagatctaggttctctggcttgatttttaccgttgccggcgtcgttatttccttgttgtacctgttctatgtctttgttgtcccccagctgttgagattcagattgagattggatctgtccccctatgacttgggcttttatggcttgggtccatctagatcttacgcctcttttgagtatgaatctccagtcgttgaaatcactgaatgggcttccggttgtgattccagatacacttttttggctccaaggggtgattctgttgctcatccaggtccagttattttggatgctgatggtgaattggtctggatgaagtacaactgggataccacccaggatttcaaggttcagagatacaatggtgctgactacttgacttactgggaaggtactgaagttgaatctagaggctccggttcttggtacatgttggattccacttacacccaaaagtatcagatctctccaattggtaactttggtggtggcgatttgcatgagttccatatcaccgagcaaggtactgctttggtcactgtctatgacccaattccagccgatttgacttctattggtggtccagaattgggttggattttggatggtgtcttccaagacatccatattgaaaccggtgagttgttgttcgaatggagagcttcccaacactatcccgttacttcctcttacgaagctttggacggtgccggtaaagataggaacaacgcttttgacttctttcatattaactctgtcgacaaggacgaacaaggcaactacatcgtctctgccagacatctgcacgccgtttcttacattgaccatgttactggtaacgtcttgtggaccttgggcggtaagttgaacgaattcactgacttgtctcatggtcaggctactaattttgcttggcaacacgacgccagatggcatgctaacaatactatcaccctgttcgataacgctgctcattctaactctgatccagattctgaatctaggggcatggtcattcaactggacctgtctcaaagaactgccgaattgttggctgcttactaccatccacaacaaatgagatctgtttctcaaggtaatgtccagatcctggacgaatccggtagagttttggttggttggggtcattctgctgctttcactgaatatactgctgatggtgacttgttgtgcgacgttcatttcgccgcttctgctttcttttctttcggtagagttgtttcctatagggcttccaaatctacttgggttggtaggccattgactattccagatgctgctgttatgggtgacagagtttacgtttcttggaatggtgctaccgaagttgttgcttggagattggaagtttgggacgctagagctgttgaaggttctacttttgatgttgttgcccaattcgctaagactggcttcgaaactgtcattgagatcccagaagaattgggttccccattgttcagactagctgctttggatgctgaaggtaatgctctgggttacactgaaatcttgcagaaagatcagggtgtcgatgtcgatgaattgttggatctgcataactggatcgtcgctgctgctttcattatttctgtcggtggtttgctgttgggtttgtatcaatgctgtggttgttgccaaattctgcccaggtgtagacgcagaccaaatgaataccaactggttgcttttggtgataacgataatggtgagaatgatccagtttga

SEQ ID NO: 69 - DNA, 1164 bp, Aspergillus fumigatus
atggcttctttaagaccatctgtcaaaagactgttgagacaaccaccatgtagactgtactccggtgctccatcttcttcttctagattgaacctgccaatcgattacaaatccactccattgttgcatcatacttcctcctctttgtcctctgccttggaactgccaggttctactacttccaaatccttgaacttgtaccaggctatcaattccgctttgagaaccgctttggctaccgataatagggtcatgttgttcggtgaagatgttgcttttggtggtgttttcagatgctctatggatctgcagactgagttcggctccgaaagagtcttcaatactccattgactgaacaaggtattgttggtttcgctattggtgctgctgctcagggtatgaagccagttgctgaaattcaattcgccgattatgtcttcccagctttcgaccaaatcgttaacgaagccgctaagtttaggtacagggaaggtggtactggtgttaatgttggtggtatggttgttaggatgccatgtggtgctgttggtcatggtgctttgtatcatactcaatctccagaagctttgttcgctcatgttccaggtgttcaagttgttatgccaagatccccatcccaagctaagggtttgttgctgtctgctattttccagtctaacaaccccgtcatcttcatggaaccaaagattttgtatagagccgccgttgagcatgttccaaacgagttttacactctgtccttgaacaaagctgaagttgtcaagccaggtaacgacgttactgttgtctcctacggtcagccaatgtatctgtgttccgaagctattagagccattgagaaagatatgggcgcttctgttgaattgatcgacttgagaactatctacccatgggacaggcaaaccgttttggactctgttaagaagactggtagggctatcgttgttcacgaatctatgattaactatggtgttggtgctgaggttgctgctaccatccaagatggtgcctttttgagattggaagccccagttaaaagagttgctggctggtccactcacactggcttgacttttgaaaagttgattttgccagatgtcgctaggatctacgatgccatcaagcaaactttggaatattga

SEQ ID NO: 70 - DNA, 2538 bp, Aspergillus fumigatus
atgtccgaaacccaccatgataatgaatcctatgaactgttgactaaccccgaatctttggaacccaccgctatcgaaaatagaaataggcacgatagatccctgtctcaaccagctaatgctgaggctagagaatctcatcatttgggtttgccaggtgaattgtctagaccacatagagttagattcagatctatctcccagcacagggacgttgataacactgacactaccgaaaaagtctactccaactcttctgattcttccactaggactttgttgaattctgctccacgcgccactgatgtcaccgatatgttgaaggctgaacaattcgatgatgaaactgatatttcctccaggtacgatggttccggttacacttctgctaattatccaccatccactccagaaaggatttccgaagactctactacccgcgaaagaaccccaaataggtctaaatccgttaaacaaagatggagggaggctggtcaattgattaggcaaaaaactgttcgcttgggtgaaagattgggtaggccattggatgatggtgaagctttgggtgcttctttgttgccagaagatttggaaggtggtatgccaattagaagagttcattctcaatacaggatgccagctggtgatgatactgatgatgaggataggccaaatccatctgctgaagctcatagattggtcaggagaatgactcaacatactaacttgaggcataggaagcccaaaccagcttatcaaagatctggtcaatctactccagaaaggccatcttcctggtatgattcttatcgcccattgtctttttctggtggtggcggtattttgtctcaattgttgaaattgcaggccgctcagaatgaaaaggatggcttgtctgctactgacgattctgataatggttctccaatgtcttctggcgctactactccaaaatctggttctgctactccaaaatctggtgctgctactccaaagaaggaaaaggtcaagtggtataagaagccacatcataggtccactgcttccttggttgaagcttctatgaatttgtctagggctactttgccctcttctgctgacgtcttgtctatgactcaacaaaagaggggtaaaaagaaagcctacaggaagcataggttggaagatgaaattaaggtcactgtccacatcgccgaaatcctggctaggcataggtacattatgcaattgtgtagagctttgatgagatatggtgctccaactcataggttggaggaatacatgaccatgactgctagggtcttggaagttgaaggccaatttttgtacctgccaggctgtatgattatgtctttcgatgacccagttactagaactgccgaagttaaactggttaggtctactcaaggcgttgatctgggtagattggctgaaactcataacgtctacaagaatgtcgtccacgatttgattggtgttgaggaagccatccaagaattggacgagatcatgaagagaaagccacgctttaataagtggatcttggtcccagtttatggtttggctggtgctgctgttggtccatttgcttttgatgctaggccaattgacatgccaatcattttcattttgggctccttggttggcttgatgcaacatgttatctctccacgctctactctgtactctaatgtcttcgaagtcactgccgctgttttgacctctttcttggctagagcttttggctctattagaattactgttgacggccagaaacagttcttgttttgcttttccgctctggctcaatcttctattgctctgattctacccggtttcatggtcttgtgctcttccttggaattgcaatctcaccaaatgattgctggttctatccgcatggtcttcgccattatttactctttgttcttgggttatggcatcactgtcggtactaccgtctatggtttgatcgatggcaatgctacttctgaaactacctgcagggacttgtctatttacggctccaaatacattcagcactttatcttcgttcccatcttcgttatctgcctggccgtcatcaaccaagctaaatggaagcaagtcccagtcatgatctttatcgctacttgtggttacatcaccaattatttctccaccactaagttgggttctcgctctgaagtcgccaatactgttggtgcttttactctgggtactttgggtaacttgtactctagattgtggcatggtcatgccgctactgctattttgccaggtattttcgttttggttccatctggcttggcttcttctggctctttgattgctggtattaattacgccaaccaagtccgcgaaaacttgcataaatctggtaacggtaccgatacctcttcccaagatacttccattgcttctttgggttttggtatgattcaggttgccatcggtatcaccgttggtttgttcattgctgctttggtcgtttatccattcggtaagagaagatctggcctgttctctttttaa

SEQ ID NO: 71 - DNA, 756 bp, Aspergillus fumigatus
atgcattacgcttacatttctattccattgactttggctttgggtgttactgcttccatgccagctgactcttgggtcttcggtaactccttgttttacctaggtccaccaactggtgcctctattactaaggctacttattccctggttccaccagatgttccatctggtgttaaggtttcttctccatctgatcaggtttgggtttctgtttgggtcggtgcttcttccaccaacggtgatgctaatgccaacttgtaccaaccattgttgaactggtcaccagatcaagaatctcaaggttgctctgctaattccactgaatggtgtgttgctgcttctacctacactccagatggtcaagttggtcaaacttacgttccagttccaccacaaactaacttggacttcgagatttccgtcgagaacaacaaggtttaccagaccgttaccgtcaacggtgaagttgtctctcaacaatccgatgctctggataacgacttgaaatacttgtactcctccaacgaatgttacaccggttctggtaactgtggtctgctgcaaggttacaagattaccaacgtcaccgttactttgtccgctgctgatgaatctttcggtaagactatggctttgttctcttgtactgatgctggcttcgctactaccgataacggcaggacctggtacactgattacattgccatccaagaaattgctttcgattcttcctccgatgcttctgttcaagaataa

SEQ ID NO: 72 - DNA, 540 bp, Aspergillus fumigatus
atgccatggtcttttactttgccacaagaatttttcacctctccagttttggctgttgccactccaattggtgttggttctttggttggctacttggtcaacaggttgggtcataccaaggagttgtactctaggttgagacaaccaccattaagaccaccagcttgggtttttggtccagtttggactgttttgtacggtatgatgggttatgctgctcaccatgctactgcttctactactttgttgactccagctactgctgttgcttcctttcaaaccttgtacaccactcaactggtcttgaactacctgtggatgccattgttcttcggtgctagaaaaccaggttgggctttggctgatattgttgctttgggtggtactgttggtaagttgatggctatgtggtgggattttgatagaactgctttctggatgatgttgccatacgccggttggttgtgttttgccgcttacttgaacgtttccgttggttggttgaataactgggactttgattctagagatggtagatag

SEQ ID NO: 73 - DNA, 1266 bp, Aspergillus fumigatus
atgacttctactgaaaaacaatttactgttgccatcgttggtggtggtattggtggcttggctttggctgctggtttgttgaggagaaacgtcccagttcaaatttatgaagccgctccaaaatttaaggaaattggcttgggtttgaccatcggtccagctgctcacagagctatgccattgattgatccccaaatccgccatgtttacgattctttgattactacccatgccgattctccaggttacgagaggttcaaacagacttggtttgaagtcgtttgggcttccggtccaaagtctggtcaagtcttgatgaatttgaaagctttgccatccggtcaaactactgttagaagagctgacttcttggatgccttggttggtttggttcccccagaaatcgctcattttggcaagagattgatcagattggttgaatctccaactggtgttcacttgtactttgaggatggtacttccgcttctgctgatgtcgtcgtcggttgtgatggtattcattccaaggtcaaggaatttatgttgccagatgaatatgagcaaactatgccaaggtattccggcatgtacggttacagggctgtcctggatatggaaactatggttgaagctgttggtgatcatagagctagagttgctactatgtacgtcggcgatggtgcctatggtatttcttacccaatcatgcacgccaagaaagttaatgttggtttgtacgtcttgcatgacatgtgggatgatgctgcttgggttagacaagcctctaaggaaaatatggccagagacatgaagcacatgggtgagtacgttaacagattggtcgaatgggccatttttgaccatccacacttgtctactttcgctcgctctagaattgctattttgggtgatgctgctcatgcttctactccacatcaaggtgctggtgctggtcaagctattgaagatgcccatgtcttggctgaattgttgggtgatagaagagtcatcgaagctagagatgttttggccgctttccaagcttatgatgaagttcgtagaccaagatctcaaagagtcgtcacctcttctaaggaaaacgcttacttgctgtgtctgcacttgcatggtgtcgaacatgatgaagagaaactgagaaccaccttccaagagaggttgaggtggttgtgggatattgatatccaggatcaagctgagagagccagaagaattatgctgaaaaagatgcagaactcctcttcttga

SEQ ID NO: 74 - DNA, 2538 bp, Aspergillus fumigatus
atgtcggagactcatcatgataacgaaagttacgagttgctcaccaatccagagtctttagagccaaccgccattgaaaaccgcaatagacatgaccgaagtctctcacagccggccaacgccgaagcgcgggagagtcaccatctcggactgcccggtgaactctcacgaccacatcgagtgaggtttcgatctatcagccaacatcgtgatgtcgacaatacagacactactgagaaagtctactcgaattcctccgacagctccacccggacgctgctcaattctgcaccacgagccacagacgttaccgatatgctaaaagcagagcaattcgatgatgagacagatatatcatcgagatacgacgggtctggttacaccagcgcgaattatccgccttcgacccccgagcgcatctccgaagactctacaaccagggagcggacgccaaaccgatcgaagtctgtcaaacaaagatggagggaggcaggtcagctgattaggcaaaagacagtccgtttgggagaacgccttggtagacctctggatgacggcgaggcgctgggagcctcacttttgcctgaggacttggaaggtgggatgccaatccgaagggtccatagtcagtaccgcatgcctgctggcgatgatacggacgatgaggatcgacccaaccccagtgcggaggctcaccgtcttgttcgacgaatgactcaacacactaatttgcgccatcgcaaaccgaaacctgcgtaccaacgttctggccaaagcactcccgagcgtcccagttcgtggtacgattcttaccgtcctctatccttcagcggagggggcggaattttgtctcagctgctgaagctgcaagctgcgcagaatgaaaaggatggtttgtcggccacggatgattccgataatggctctcccatgtcctcgggagctacaacgcccaagtcaggatcggccacccccaagtctggtgcagctacacccaagaaggagaaagtcaaatggtacaagaaaccgcaccatcgatcgactgcttccctagtggaagcatcgatgaacttgagtcgggccaccttaccgtcatccgccgatgttctgtcaatgacacagcagaagcgggggaagaagaaggcttatcgcaagcatcggttggaagatgaaatcaaggtgaccgtgcatattgcagagatcctggcacggcatcggtatatcatgcagttgtgccgtgcgctgatgcgatatggtgcgcctacgcaccgattggaggaatacatgaccatgacggcgcgggtcctggaggtcgagggacagtttctgtatcttcctggttgtatgatcatgtccttcgatgaccctgttactcggacggcggaagtcaagctcgttcgttcgacgcagggggtcgatctgggacgattggcggaaacgcacaacgtttacaaaaatgtcgtccatgacctgatcggagtcgaagaagcgatccaggaacttgacgaaatcatgaagcgcaaaccgcgttttaataaatggatcctggttccggtgtacggtctggctggcgccgcggtcggcccatttgccttcgacgcccggccaattgacatgcctatcatcttcattcttgggtcgcttgtcggtttgatgcagcacgtcatatctccccgatccaccctctattctaatgtgttcgaagtgacagcagcagtgctgacctcgttcctggcacgcgcattcggctcgatccgtataactgtggacggtcaaaaacagttcctcttctgcttctccgctctggcacagtcctccatcgccctaattttaccgggtttcatggttctgtgcagcagtctcgaactccaatcccaccagatgattgcaggttctatccgcatggtcttcgctataatctattccctcttccttggctacggcatcacagtcggcaccaccgtctacggccttatcgacggtaacgccacctccgaaaccacctgtcgtgacctctccatctacggcagcaagtacatacaacacttcatctttgtccccatcttcgtcatctgcctcgccgtcatcaaccaagccaaatggaaacaagttcccgtcatgatcttcattgccacctgtggctacattaccaactacttcagcacaaccaagctaggctcccgttccgaggtcgccaatactgtcggtgcattcacgctcggtaccctgggtaatctctacagccgcttatggcacggccatgcggctaccgcaattctacctggtattttcgtactcgtgccatcggggctggcctcttcgggctccttgatcgccggaatcaactatgcgaatcaggtccgcgagaatctgcacaagagcggcaatggcaccgacacgagcagccaggatacgtctatcgctagcttaggtttcggaatgattcaggtagcgatcggtatcactgtgggattattcattgcggcgctggttgtatatccgtttgggaagcgccggagtgggcttttcagtttttaa

SEQ ID NO: 75 - DNA, 7683 bp, Aspergillus fumigatus
atgccaattaattcttttgaaggcactggtgaaccagttcaattgccatctgctccagatgtcgatattgaagatggtgcttccaattccttggatgatgcctccatgtctattgctatcattggcatgggttttagaggtccaggtgacgcttccaatgtcgaaaaattgtggaaaatgattctagaaggtagagaagcctggtcccaaattccagaatctaggtggaattccgatgccttctatcacccagatcacgctagacatggtactatcaatgtccagggtggtcactttttgactgaggacgtttctttgtttgatgctccattctttaacatgacttctgacgaagctgctgctatggacccacaacaaaggttgttgttggaagttactcatgaaggcctagagaatgctggtattccattgccagagattatgggttcccaaacttcctgtttcgttggctcttttaacgccgattatactgatctgttgttgagagatccagacgccattccaatgtatcaatgcaccaatgccggccagtctagagccatgatggccaatagagtttcttatttttttgatttgaagggtccatctgttaccgtcgacaccgcttgttccggttctttggttgctttgcatctggcttgtcagtctttgagaactggtgatgctgctatggctattgctgctggtgttaatgtcattctgtcccatgaattcatgtccactatgaccatgatgaaattcctgtccccagaaggccgttgctacactttcgatgagaagtctaatggctatgccaggggcgaaggtattggttgtttgattttgaaaccactgaaggttgccattagggataaagatccaattcgtgctgtcattagaggctctggttccaatcaggatggtaggactccaggtatcactttgccatctggtgcttctcaagaagctctgattaggcatgtttataatatggccggtttgcacccacatgataccgagtttgttgaaactcatggtactggtactcaagctggtgatccaattgaaactggtgctttggccagagttttttgtgtcggtcgcaattctgacaaaccattgaggatcggttctattaaaaccaatgttggccacttggaaggtacttctggtgttgctggtgttatcaaagctgttctgatgctggagaacaggattttcctgccaaaccgcaatttcacttccttgaattccaggattttgctggatgagtggaagttgaagattcaattggatccagagccatgggagtcttctactccacatagggtttctgtcaactcctttggctatggtggttccaatgctcatgttattttggaggacacttatggttatttgcagtctcacggtttgcaagctccagttggtaaaccaaggactccattcttgaaggaagctctggaaccatctcaaaaaccacactctaggcacgatgagtctccaattagaactaggttgtttatgttgtccggttttgacgatcattccctggccaagcaaattgagaacattcgcgtctacttgagagagagggaatccattgctgacgatcaatttatgtctaatctggcttttactctgaaccacaggaggactactttgatgtgcaggactgctgttaacggttcttctgcctcctctgttatcaaagctttgggtggttctattcgcgttagaaaagctactaggaaacccgttgttggttttgttttcactggtcaaggtgctcaatggtgtggtatgggtagagaattggtcaaagcctacccagtttttagacaatccatggaaaggattgacgctcatttgattagattgcaggccccattttccgctctgggtgaaatcttggaaaatcaagatgcttcccgcttgaatcacccattgcattctcagactatctgcactgccttgcaaattgctttggttgatttgttgtcctcttggggtattgagccagattctgttactggtcattcttctggtgaaatcgctgctgcttatactatcggtgctttgactatggaagatgctatctctgtcgcttattacaggggcgtcgctgcttctaaattgttgcacaatgacgaagttaaaggcggtatgttggccgttggtgtttctccagctcaaattgctccatttttggataccctgaaatctggtaaggctgttgtcgcttgcatcaattccccatcttctattactgtctctggtaatgttgacgccattgatgaactggaaaaggtcttgaaggaaaaggagttcttctgcagaaggttggtcgtcgatgtcgcttatcattctcaccatatggagttggttggtggtgaatacttggacttgatctctaatattcgcccacaaactggctctaaatctggcaaacatcccgtttcctttttttcctctgttactggtgctggtgttgaagcttctgatttgggttctcagtattggactaggaatttgctgggccaagtcagatttgttgattctgtcagagctttgtgtttcgaaaccggtactcagaagtctatgttcgccgctttgaataacagaagagttagacgcccaaacggtgccaggaaagtcaatgttgatattttgttggaaattggtccacatggtgctttgtcgggtccaattaggcaaattttgaaagaagataataagttgaactctgccggtttgcaatacgcctccgtcttgaccagaaaagccgattccgttactactgctttggaaattgctggtactttggcttctttgggttcccaagttaatttctccgctattaatgatccactggttgaaaccttggatacccaggttatcgttgacttgccaccatacgcttggaatcattctaggccatactgggctgaatctagaatctctactacttttagaaagagaaaacatcccaggattgatcccttgggtgctttggacagattgtcctgtccatttgaaccaaggtggagaaacttcatgcgtgtctctgaaattccatggttgaaagatcataagatccagtctaacatcgtctatccagccgctggctatattgtcatggctattgaagctgcctcccagcatttgttggatcaatacggtaataaagacatgtccgcctttatcctgagggatatcgaaatcaaagctgccttggttttgcaagaaaactctgctgcagaagtcatgacctctttgagagcctggcaaggttctactaaggcttccgaaaggttgtatgaatttaacgtttattctgttactgccgaaaataggtggactgaacattgcaggggcttggttggtgcttccgatttgtccttggatactgaatatgaaacctcttcccaagttcccaagcaagcctctgatttgtctgtcattgatacttccactttctacgaaaagctggcttccattggtttggaatatggtccatgctttgctaatttgactcatgccaaccagactggcaatttgtgtttcgctgaagttactattccagataccgctgctgttatgccaatgaacttccaatatccacacttgattcacccctgcaccttggattccatctttcataccgtttttgttcaaactaatgtcggcgatgatcccgctattccagttcacattgaccaattgtctgtctctagatctgctgaacattccccaggtactagaatgcatattgagactcacattgaaaagaggaccaggaagtctattgtcgcttctatcaccgtcattaactctaacgacaccatcgctatgtccatcaaaggcttgagatgcaagcacttgaagaattctgacccaaaagatatggtcaacccaactgaaaggttgggttatatgttgacctggaaagccgactccgatttgttgtccaagcaagacttctctaccgtctttactgaagacaatcatcacactcaagaatctgctaaaagacaactgttggaaggctgtgccttctcctatatccgcaaagccattcaagatttggaaccagccaataaagaaggcttgcatccaaggaggagggaacaattggacttttttgtcgatagaactcaaaactccagattggtcgcttcttctgtcactaacaatgctgatatccaagctttgtctgcttctggtccagaaggcagattgttgactgccgtcggtgaacaattgtccaccatcttgaaggattccaagttctctaatattgatatggatttgtccatttgggaacagtactgggataccatcaggttgtcccccgtttacgaaaagttggcttcctacttggaattggtcggtcataagaatccaatgatctccattttggaagttgaaggtaccttcggtcaagcttctcaagaccatttggaaaggctgttgggtaataatggtcatggtccattgtgtagagaatataccattactcatgaaggccagtctatccccgaacacttttccccagttgtctctaagtggaaaccattgttgaaagtcaaggaattgaacctgaatcaatcccccgaagctcaaggtttctccaaatatcagtatgacgttgtcctggctccattgggtttgtgtactgttccagctaaattgcaagccttgaggaatattcacgctttgttgaaaccacagggtcatttgatcgtcgttgatcccattgctaggcatgataacttgactgaatccgttatcttcgccaattctttgggttgttggccagaaggtagatttggttataccttggaaggttggaatttggtcttgtctgctgctggtttttctgaagctgaagatgcttccatcccaagagaaggcagatttatgatgattactaggccattgcatggtcaatccatccccaagcagtctatcttgattatttccgaggatgatgataacggtatcgatctatccgctttgcaagactccttgtccccaatgtcttccgatatcgaaattgctgactttactcatgccaaaccaaaaggtagagtttgtatcatcttgtctgctttgtctcgccacttgatggctgacccaaccccagacgaattggaagtttctaaacaaattttcctgaaagcttctggtgttttgtgggttactagaggtgctaccatctctccagttactccagatggtgctttggctactggttttgttaggacttctaggtctgaatctggtattgaaaggatcgtcactttggatttggatggtagaaaacccttgtcttcccatcatgctgccgaaattatctgtaaggttgtcagagaaagaatcctgactgatggtaatggtcaatctgatactgaatatgctgaaagaaatggtgtcttgttgattccaagggttgctgaaaatcaagccttcaacaggtgtttggccgcttctcaggaaacccaaaccactaatttggagaaattccatcaagaaggtaagttcttgaaggcttccatctctgacgcttctcaagaaggcgaagtcttgtttgtcgatcactccaaaggcaatgatattcccgaggatcatattagagtccagatttatgctgtctgcatcgacaaacaagctgctaacgctttggaggaacaagacacttctcaagaactagctatgggttttggtgcttctggtattgttcattctgttggtggtgctgttttggattttgctccaggtgatagagtcgcttgtttggctcaaggcgctgttgctaattatcaacaagaacaagctttggcttttcaaaggttgccagaaggtttgtcttttgaagctgctgctgctttgccagctgcttattgtaccgccttgtatgctttgcaaaatatcggtagggttgtttctactaatagagttctggtctacggtgccactgctactgttggtcaagccttcgctgaattgtgtttgaatatccatgcttacgccttgttcgtcgttagggctgaaaaagataaacactctttgtgctccactattgctgttccaggtgacaggattatcgtcaacgaaaatggcgcccatctgagaaggttgttgagaaaagaatatcaaccattcgacttggtcgtcaattttgaatccagggacaacgagacgctgcaaatgctgtgtagattggttggtactggtggtaaattcattcatttgtaccgcgataaccgctggaatcaacgcactctggctatccccaaattggaaaatgatatcgtctttgctactctggacatccaaaaattgctgagggctcgcccaactttgttgtataagatctggggtgatgttatgcgcatgtacagggctggtcatattagaggttccaatgttttggagacgtactccatttctgacatgagagatgctttgaacgttctggagttgggtgaattggattccctggttttggctgctaaaccagaagatttggttaaggttatgactccaaagccacaagctgctttgttgagggctgatgcttcttacattttggttggtggtttgggtggtttgggtagagctactgctttgtggatggctgataatggtgccagaactttgattttcgttaataggtctggcttgtcttctcaagctgctcaagaaactgctagggatttgaagcagaaaggcgtcagggttattattcacgcttgcgatatctccgactctaagaaggttaagaagatggtcattgagttggaaagaaacgctccaccaattaggggtgttattcaggccgctatggttttgcgcgatactcatattgagaagatgaccattgacgattacttgtctgtcttgaggccaaagtactttggtacttggaacttgcacaggcatttgccagctgatctggatttcttcgtcatgttgtcttccatttctggtattattggcaacgctactcaggctgcttatgctgctggttccacttttctggatacttttgccatgtacaggaattctttgtctttgccagctgtttctttggatttgggtgtcattaccgatgtcggttacctggctggtaatagagccttggaagctaagatggctcatcagggttttcattccactgacactgctactttgatgtctttgattgctgcttctattagagctccctttggcgagggtggtacttctcaaatcattactggtttgggtgaatggagggaaggtcaatctttgggtaatttcgatgctccattgttcgcccacttcaggagacaatttcaacaaaagtccgaagaagatcagtctgacgaatgcattggcaaactacacgaaaacttgagagccgtcaacaatttggaggaggcttctggtgttatttactccgctttgtctggtaaaattgccgctcatttgtctgttcccattgaatctatcgatgcttctcacccaatcaccgaatacggcattgattctcatatggctgtcgaattgaggaattggatcgccaaaactatggaatccactgttccaattctggacattttggcttcctccactttgctggatttggctggtaaaattgcttccaaatctcgtgttgttcacgttgaagagtag

SEQ ID NO: 76 - DNA, 678 bp, Aspergillus fumigatus
atgccattgaagttgttgtgtttgcatggttggggtaccaataccaagatcttgcagtctcagttgaacggcttgatgactgaattgagaagggacaacaccgctactttccattttgtggagggtgatattgactctgttccaggtccaggtattgctggtttttacgatggtccctactactcctactacaagttcccaagatccttgtctgatccagatggttccgaagaagaatctctgttggaggcttacaacttgttgtacgacatcatcgacgaggatggtccattcgatggtattttgggtttttctcacggtggtactctagcctccggtttcttgattcattacgccaagacttacccacatgaaccaccattgttcagatgtgccatcttcatcaactctttgccaccattcaggatggactccggtgaaaacattgtcattgactccgacttggatggttacatcaaggttccaaccgtctccattgctggtgccaaggatccattgttcgaatactctttggctttgtacagattgtgcgatccatctagatctacctctattgtccactccaaggcccacgatatcccaaacgacaagaagaatgttgctttgatggctgctggtatcagaaagttggctattgaagctttggctatttggtga

SEQ ID NO: 77 - DNA, 1290 bp, Aspergillus fumigatus
atgatgaatagtgaacgaaagctccgtgcggcatgcgaccgctgccatgaactcaagaaccaatgcactcgcactggtgggcctgacagtcggtgtgaccggtgtaagaggcttgatatagactgtgtgtataacaccagtgcgcgcatgggccgtccgcgagtatcgcgaccgggttctgagaaccataaaggagcatcatccaccagacactcaaaacgaggtgccgtccaggctggcagccagtgcggtgctactgcagtgccgcttcctgttgatcatgtcgatctagcttcggcagtacacgatagatctggcggttctggatcagatagctcccgcagtctcgaaccagtgctagggcttctagatcctgttcccctctcccaggacttagagctgtattctccagactttgcgcacccggctcacgatgatccaacaggcggacaagggctcggacgtggacatgggcacgcccacagggaatatcatcaagtggagagcctacaacagaaatacaaggaagtgcctgacttctctgaatccgacctggagatgtcagaaaagggaacagcgcctattgttaagactaccggcgcagatgagctcctacggctgcagtttcacctaagcaatctgttaacaggggcgagagaatcgcccacaaggcatcagccggccattgatgaggtcatgatggtctgcaaagagctgctagagctgctccccatctcagctcattgctcctcttcagactgcggtactacaagtaagagtgggattggggcaggacggccattcactccagccagcgtcaatgctggacatcctgatccctgcgacggaattggtcagccaactcaacgaggaggagggcctttccacccactaaggataaactacattgccttcctacaagtcgcgacatcatacgcatacgccttgcagctgctggatcttgctgtggataatctcataagccgtggtggtaatctggccctcgtaagcctgggtaccttcaatcttgcatcccagccggccatgagtacctcggtgggtgcttatatgatttcgagcatggtccatcagctgcgtgatgctattagtgtcttgactcctgaatatcagcatcagcaaaggccaccaccaccgcatgcatcatcaccaaatggccttcgggcggccgctgcgactgcgaacaattcgatacatgttgcggtggatatgatttctcagaaggagacgtctttactcgacaaattggcgcagataatgattaaaccataa

SEQ ID NO: 78 - DNA, 744 bp, Aspergillus fumigatus
atgagcccagaaacgaaacccgccatcatctgccttcacggccacggcagcaacggggagatcttccaagctcagtcccaaaatcttacgcgagtcctatccccccgattccgtttcgtcttcctcgactcgcccatcacaacggcccaaactggcgtcggcgtgccaccctactacgcacacataaagccgtacagacggtggcatcaggacagaaacacaatcgggctatttgatgtcacagcggaagatgtcgagcgtgaacgccgggctgtgcgggattcattgaaggatgttattgagcgtgagcgccgaaatggaccaggggccggggttgttggcgttatggggtttagtcagggaacgagggttgcgacggctgtttgtcttgactctgagctggggagggacatcaggtttgcgattatgatttgtgggatttgtccttcactggcgttgagtgctgctgagacgcaggtatcgcggccgctggatattgttcctgtccatgttcaggggagtggtgatccgtggttggccaaggggacgaggttgtcgaaacagtattttaatcaaaggctcgcgacggtggtcaggtttaaagggaggcatgagattccggtgacgacaagcgatgtgcagaatattgctgaggttatggcggagtattgggaacagaagcgtgacaccgtgctggctgtcgaggttgcgagcgagtttgcggctagaatggtatctgcctaa

SEQ ID NO: 79 - DNA, 1056 bp, Aspergillus fumigatus
atgaacctatggaaattttcagtcggactactcgccgctgtaaagtccgtctggacccgcggcagcccattcgctgcactcacagccctctggccaacaaatgaagagggcaaatttatcattcaatccgaaggcattcggctggcttttacaaaccatggcgcagcccttacaaatctctggctgaataatacccatggcgaggaggtcgatgttttactcggcttggactatgcgaggggttatccgtcccttcagtcaaatccatatttaaatggggttatagataaaggctggggccgacagacctgggacatcgcagtgcatatcagcaacagcattacattcgtgctgttcgataacaggtggaatgggttccctgggatcttcgcctcgtgcgtgacgcacacggttacaccgtatgagtggcgaattgccttcggggttacgccgttactcaaggcaggcccaattaattttagtcagcaagttttctttaatcttgatgggtttaggggtaatgccagcaccagcgatgctagtgatagtacggtgcttaatcataggccgaggcttccttcttccgggatgcgtttcgatgttgatgagtgggggattccgacaggcgatatgaagagtaatagggaggggaaggagtttgacttttggtctgcggataagtttattggcgacgaggttcagaagggtaatgctggatctgatgtgacttacgtgctctcccataaaccgttgggcgacaaggaagacgaacctgtggcaatcctctcctcgaagccatctggtgtcaccatggagctttacacggaccaggacgctctccatgttcacacgtggaacagtgacttggctgggttgcggttgaagaaaggtcaagggcaaggcaaagtcgctcaacacgcagcgatatctctagagatgcaagactggccagatgcagtgcaccatccggagtggagacacagagagacgatttggggtatggacggactctatacgcgatttgcaacgtataagttctcagttgaaagaagataa

SEQ ID NO: 80 - DNA, 1662 bp, Aspergillus fumigatus
atgccacatctattaaagaagctattcactcagtttctttttcagcaacccttcagcatgatctcctttctcgggttatggctgtgtacggttacactagcctcgggaggaatcttccaccaggctctcgctggcggtgagcatacagcattgcatttccaagtgctaggtgctcatgtggttgcctttgttgcctttgctgtgtattggatgatcctctacccccgttattttacccccttcggcaacatccccactccttcgcgtcgaagaattctgacagggaactacccagtcctgttccccgataacgcatgggttcctctgcgagaacttgccgaaaccacccctaacgacggtctactacgaatctactctgcgttgagcggcgaggcccttctggtgacaagcccgccagccatcagagacatgctcacagtcaatgcctttgacttcacccaccaggacctcgtcaagattgctatcagacgattcacaggtagcaatcttgagagaacacagctccatcgcaaaaacatgatgccagcattcacagtcccgcacgtccgaaaattaaccagcatcttctgggccaaagctcaggaaatggtgcgctgcatgtcgaacgagctccgcgcagactccttcgcccggatcgacttccgcgagtacatgtctagggctacactcaataacatagggcttgcggggatgggccacgatttccagacgctcaaacagccagatactgacctgcgcagccaccacaggaaactgatcctcgacccgactcgcgtttttagctgggtggggctgctgagtcggtacttcgacatgagactattgatgagggtgccgcttaagaagttgatcgagatctcgcaatcggcgaagtacctccgtgaactcacgacggcggttattcaagggagaagagagcagctggttgtggctgagaacaacaggggtaaggatatcatcactgttgctctcgcaggcggtgtttttgacgaacaccatctagtcgaccacgtcatgacctttttaaccgcaggacacgagtccacagctacggcttttgaatggacgatgtacgagctaggacgccgaccggagatgcagagccggttaagagacgagctgcgagcgacaataggcacagatctggcggccgttaactttggattacgggtccagaatctgccttacttgaatgcattctgcagtgaagtgctccggtgctatcccttctcgccgattatcgtaaaagttgcacaaaaggaaaccatgcttattggccagcggattcccaagggcactgttgtgctttactcggccgaggtgtcgaaccatgacaagaccctttgggggcctgatgcggataagttcgatcctgagcggtggatgggcgcgaagaaggcaaagtctggtggtgcttcgagtaattatgcgatgcttacatttggcgcgggtccacggaactgcattggagcgaattttgccagggcgacgcttgagtgtcttgttgcggcagtgttgtctacgtttgagatcgagcttgcgaatcctgatacggcggggaggttgaagtttgggcagacgaagaagtcggcagaaggcatttacggaaggcttaagtttgtacaacctgtggaagtctaa

SEQ ID NO: 81 - DNA, 7194 bp, Aspergillus fumigatus
atgaaccaatcgccattatacgcatgggctgccgtttcccaggtgaagccagctccccctccaaactctgggacctcctccacaacacgcgcgatgtctcccgtgacatccccattcaacctagaccgcttctaccacccaaccggcagccatcacggtaccaccaacatccgccaggcctacctcctttcagaagacgtgcgcgcgttcgatgcaaaattcttctccgtccccccaggtgacgcagaggccatcgaccctcagcagcgactgctcctagaagtcacttacgaggctctcgaatcatcaggccatacgctggccgacctgtccaactcgaatacgggagccttcgtcggcctcatgtcccaggactacttcgcgcttaatggccaggatgtagactcagtccccacttacgctgcgtctggtacggcggcgagtaatgcttcgagccgactctcttactttttcaactggcatggcccgtccatggcaatagataccgcctgctcatctaatctcgtcgctgtgaatgaggcagtccaagcccttcgaaacggcacgagccgcgtcgctgtagcttgtgggacaaacttgtgtttgtctgcgttcacgtttatcacattaagtaagctcagtatgttgtcaccgacctctcgatgtcacatgtgggacgccgacgcagatggctacgcccgaggtgaaggtgttgcttgcgttgttttgaaaaccctcagcgatgcgatttcagacagggaccctatcgaagccgtgactcgggaagtgggcgtgaatcacgatggcaggacgaaggggttgacaatgccaagtgctaaggcccaggcggcgctaattcgtaacacttatgcacgcgctgggctggatccaacgaaggaggctgatcggtgtcagtatttcgaagctcatggcacgggaacgaaagctggagcgttttttccacagtctgactcagaaggcgaactattcgtcgggtctatcaaagccgtgatcggccacaccgaaggcacagcgggactggcaggtcttatgaaggcttgtcttgctcttcgcaatgcaaccttcccccccaatttactctttaataaattaaaccctgaccttgaactgttcacaagtcatctccgtgttcccacggccaaccaaccttggcctgaatttgtcaacagctttggccttggaggtaccaacgctcactgcattcttgaaacgtacaatccaccaacagccagtgacccagtcattgaaatagacatggccgcatcaggaacatgctgtattccatctgtattctctgcagcatctgatagatcattggcgacactcttgcagtccacactaaaattcatggacgagaataccgacgttaacatgagtggactggcatataacttgagcaccaagcgatctgccctgcagcgaagacttgcagtctccgctacatcgatcgacgaacttcgtgacaagatcaagtccacgatagaagccgcgtcagagaatgacgccactttgcactccacttctgctttacccgaacctgcttcattgcttgggattttcaccggccagggcgctcagtggcaaggcatggggtcccagttgatatcgtcgatacccactacccccgtcggtaaagcctctctttcgcagcctctctgcacggctgtccaagttatcctggttgacatgctccgcgctgcgggagtcaagttccaggccgttgttggacattcctctggggagattgctgctgcctatgcggcaggctttatatctgcatgggacgctatccgcattgcagactaccggggattctacgctgaaatggcggcagcgcctggtggggaaaagggtgcaatgctggctgccggcacctcttttgaggatgctagcgacctttgccagcttgatgactttgccgggaggatctgcgtggctgctcataactctcctagcagcgtgactctgtcgggtgatatcgacgctatagccttggcacggagggtgcttgaagaagaggagaaatttgcccggcgattaaaggtggacacggcatatcactcgacacacatgcataaatgctctgtaccttaccttacggcattgagaaactgcaacatacaagtgcagcagcccggccctgatgcaccgcagtggtttagtagtgtccgaaacggtcaggtcatcagcagcatggaaagcttggacagtcaatactgggtcgataacatggtacagcccgagctattctgcccagctgtccaaacatgcttgaagtatgtggacaaagccatcaactgcgttgtagaggtgggaccgcatcctgctttgcagggacctgcgaaagattctattcttgccgctgtggatcgggagatcccatatactggcaccttgaaccgtggaaagagcagtacggtggctttttccgacgcccttagattcctttggtgtctgtttggctctgctgctgtgacgctcggagcgttccagcaaacaaattacccggatactccgactacaatgacccgcggtcttccaacatacccatggactcatgacagggggtactttgccgaatcaagactcatcaagacctttcacaaccacccgttgcccttccatgacttactaggaatccagacggcagatggagcaagggaggaatggggaccagtgaaatcgatcgatctcttcgatcttgaaatccacaaagctatcgccagccatgactccacaggcaccgagctccttacatccatgaccaaggtgtctgccctcgacaccgagtgggaagaaatcaccgctgacttctcagcctactccactataagcaaagacgctgccaaccttgggctgaactgctgcggtcgtgtgcgtgtgcttctaggagagggcgaggactcgccttcccacttctcacctagacttcccccactcggaaaactgaccgcagtagacgtggatagcttctacaagatcctgcgcgatgacttcggattcggatacgagggccccttccgcgcgctcacgaatatgtctcgcaaaaccggcttcgcaacaggcacagttcggtgcgagaggttcgacgactctgaaacgtctctgctcttccatcccggtatgctggatagtgccttgcagggtctgaacgctgcccatagcgccccaggagatgaccggctctggacaatcatcgactgcaatatcactgatccacgcgatacgcacatcactggagatgtggaggtcttctcggagggtttcagggagaagattatcgaggttgaggggctcaccttctccccgtttgcgagcgcaactgttgagaacgaccggtgtgtcttccaggagtcgtttctgtgccatgctaagccgaacgcggacgttatctttggtgatagacaggcaactcccgaggagagtaggaaggccctattcgctgagcgcgcggctccagagcagcgcgaggcacttccatggtatcggcaagctttgctgaagaacgctgagctgttattacaccttgtcaatgacgggaaacatccgtttgccccgcagaattgggtgagtgataccagagaggatatattcaagatgatggacagctatcccacgacagacgccgatttcaacctgaccaaggccgtcggcgaacatctacttctgccttcggtactgaatggagatacaagcatcctacaatacatgaccaaggataactaccttgagcggtactacgtagatgccattggattccagctgcttaacttcttgattgccggggtgatggaaccgctttgcttgaagtctccccgaatgaacttccttgaagtcggagccggaactggaggcgcgaccaaggcgatcctggagaagatcggttactcctatgcgtcttatacatataccgacatttccagtgccttctttgaccatgatgcgggccactttcaatcgcacgccagcaagatgattttcaaggccttggatatcacaaaggaccccgccggacaaggcttcatcccgcagagctatgatgttatcgttgcctccaatgttttgcacgcgaccgagtcattgagatccgccctagaacatacacgcaggctcttgcgtcctggtggttatcttgtgatggttgagataatccgtaacgacgtaatgcgccatggtctagtcatgggcggccttccaggctggtgggtcggtgagaacgatggccggtacggaggccctagtattactcttgatcaatggcataaaatgcttcgagaaaccggctttagtggtatcgagactaattcgccgatgagggacccagtcggcgtgcccggatcgattatcgtttctcgtgctgaaactgatctcgtcacccagttgaccagacctcttagctcaaagtttagtacagcaacagacaaaactccattactcattataggtggtatcagtccatttgtatcgccgttcagggaccagatctgtctcaccctgaggcggcatttcggagacatcattaaagttgagcagttcgcggatttgccaccgcttcctgagtgctaccatgtcctcagtctcacagagtgcgacgcaaacttgttcgaggacatggaggagtcggtcttcttgaatctgaagacagtgttaggctctgcactgagtgtactctggttgctccgggatcgtcgatctagtaatccgcatgccggcactacgcttggtcttttcagaacacttttttacgaagttccggggaccttgttgcagactctggatattgacgtcgtcaatatggacgactgctcagtcattgcagaatcaatgtgccagcttaggttccagtcggacatggcgagacgtggtgagacggatgagatccgctgggagtttgaaccggagcttgttctcaaggacggcgagctttatgtcccaagagttcgtccgcatgatgggcagaataatcgatacaactcctccaagcgattaattactcacaatgtggacgtgcacacgactcctttggctctagatctggtcgacggctcgtacatggtaagggagcagcacaccatagagaaggactcacccgaagtggctacagtcaatgtctcctgttcattcttgtcgtcaataaagactcccgtgggatatgtattcgttagcctcggagaaaatgtcaagactggcgaaaagacactttgcttcaccaaccataacgggtccatcgtcaaggtccacaaatcctggacaatatcccttggcgaggttgagccagatccagttgcagcatctctgctctcttggcatctgaacgggctaggcaggaaggctcttttcatgactttgagtccggaaatgtgcggccgaaactgggtgtaccttcatcctaacagcaccatgagagccatcgctgctaacttaccagccgacgtcaccctgtacgtcgacgcctctggagccggcgaatctccttcccaaagtctcggatccaagattgcgacctctctatcatcagtctgtaacaaggttaagatgtctagcctgactgcatcagaagcatcctttcttccgcacgatgcccctaaaaccatcacagatctattccgtcacgttgcttccttcgcttcctccttggtatccactcaagcaactccagagggtgcacctctcgatatcttaccgctcaaacgggatcaatatgttcctgtctctgttgagccggttacgcaacgtggtgatctgttccgtcctgatcgcacctactggctagctggtctgaccggagacactggacgatctctggcggacttcatgattgcccacaatgctcgcaatattgtgctaagcagccgtacgcccaccgtctacgaggactgggtagagtggcacaagtcaagaggtgtttcagtgaggtatttcggaggggatatcaccagctttcagtccgtgaaacagatccatgacgctatcaaggagtctatgccgcccattggcggcgttgcaaatggcgccatggtgctgcgagacagttccttcatgaaagtgagctttgacgatttccaagcggtcttaggtcccaaagttaaaggcaccatcaatattgaccggctcttctccgatcccaaccaactgctggactggttcattgggttcagttcagttgccggcactgtcggcaacccaggacaatcggggtacacagctggaagttgtttcatcaaggcactagtcgaccggcggcgtaagcaaggtctggctggatcagtcattgacatcactcgattggtggggctgggcttcatcgagcgtgaaggcgatggccgtctaacaaaggagcaccaagagcgtctaaccacgcggtcggggactattgcgatgagtgagaatgacctgcaccagttgtttgcggaggcgatcttggctgggcgaccggatctcgatcttaacccggagattattacaggtcttgcgcccatcactgttgagcagtccaaggatacatactggaagaccaatccgaggttgtcgctgttgatcagagaggcaggacagggtgatttaaaaggcagagacgggggcaacgcggctcctctgagacaattgttaggagacacaaagacaatgcaaaacgttgcgaatgtgctttcaggtgccctcaaaggaaagctgcaagcgttgaaattcctgtcggactctgacagcttgtacgacactacgcctctggtggacatgggtgtcgacagcctggtagctgtggaagtaaggtcttggttcttgaaggagctcacagttgacgtgccactcatgaagattctgggcggcgcatccatcacggatttagtagaggttgtcgtgcagaaggttccccgagagctattgagtaggcttgatcccgaagggcggcgtcaggacagcaatggcgatgttcctgctactgtgggtgacaatgactctgttgaaacagtgggatcaaagatgaatggcattaacagcgctcatgaaaatggttctagcggtgtcaatggtatcagtggtacttatacacctgatatggatagcactacagaccttaatggtactaatggggctgcagttatcaaggaaatgttagggcataaagccataaagggtgttgttccaatccttctaaatgcacaggaggttgcctaa

SEQ ID NO: 82 - DNA, 552 bp, Cladonia arbuscula
atgccatcctaccttatcactggtgccagccgtggtctagggcttgctttcactgctgagctgctcaggggtcacaataacatcgtaatcgcgacagcaagagacactgccagtgcaaaatacctacaagcccttaaaggaaagcacaacgacggccgtttccacattgtccagctagatgttgctagcgatgatagcattgacactgctgctaaggagatagcaaggcttctacctaatggactggaccatctcatcagcaatgccggtgttagctactctccacacgcgacttgggataacctggctattcgtaagtggtctggggttctccagcacgaaggcatcacgactgccctcattcatcccggatatgttggaagtacggaattgggtggccaggctctagattggattaacacgaatgcgcctcatgttgaacatctgacacccgcaaagagtgctgaagatgtcatcaaggtcctgaatcaacttaagaaggaggataatggcgcgtttctcaatattgatgggacaaagctgccgtggtaa

SEQ ID NO: 83 - DNA, 1800 bp, Cladonia arbuscula
atgttgatatcatcgaaaatagcagacagactggcgcggtttgcgcgtggtgcggtggatgttgactttattagcaccgttgccgaggctattcctgcatcttggcagaacgacaacgacgaaatgcattcacttgacagcaatacactgatttatgaaaggctccgtcgtgtcaacgaggcactgcctccaggaaccgatctaatggcgaaaccttggatgctgtgcgcagttcttgagcgagctgcaattgtcgagccgcggctattccacctgatgctgttgcattacgtcctcactcttgctccaatcgctcgatttggcgaccctgagcgagtgaaaagtttggtcacccagctcgagacgacgacggcgattggttgtccactaatcactgagtccggccgaagtaatagtcacctccacccacggacaacggcgacttatgatcctccatcgggtgggttcgtgctacacactcccgaccgtgaggcaataaagtgtccgtccatcactagtaatccgtacgttggcaaactggccaccgtattcgcgcagcttgtcgtctccaacgaggagcgtggtgtattcgtcttcgtcgtccctattcgggatgccgctgggacggtaactcctggagtccaagtcacgccacttgtgtcgtcatcagcgctagtcctcgactatggagctgtatctttcaaccaccttcatgttccgttcgacatgtggatgaacgatggggcgcgtataacgccaaatggtggttttgaggacccgattgggtcgacagggcgattagcccgcacaatgagcgtcggaaccctatcgtggctggctgctatctctctgtcagcagccattaccagagcagcagctaccgtcgccttgcgatactctgcaaaccatttcagcgcaaagcttctcgcatgcgaccagccactcataaaacggcgtaaccaatgtgatgcaatattcagtgcttatgctaccgcgttcacacttaccgcccttgccaatcacgccaaaggacaccgttttgaagacgatagagacgatgccagcaagcaatgtgccagccagcaatgggttccctgggtgtccgttgatcaagagttagcactacttaaggccgttgccagcaatcttgcagagcagacgattgatcgctgtaaaaagcactgcggagccaacgccgccgtcggcaccactcttttcggtgtctaccttggcattgcgcattcgtacgtaacggcgggtggggataacgaattgattatgcttgaggctgggaccctaacgaacggcacagcgaagccacatcggccaacaatggcacctgactcgtttccaacgacgctgcaaacttgccgtgagctagcccaacatgccgaagccgagctgcatcatcgcgtcagaacaacaatctcagctgtcgaggcatcaagtgatgaacaatatgacgctttgaacccccatcttgcactaatgttcgatgcgagcacagccaaagctgatcatatagtgctaaatttgctcgagaaggcaattgcatcggaaccagacgctcaagcccgccacgtgtttgataaacttgggacaatatatgccttgaactgggtggagcgccgagctagtacgctatttgaccttggactccttaagcaagggaccatcggatcaatccgcacgactcgggctgagctgtgtgaccagctccttgaccacatcccagaacttgtcgaaggtttctcacctccttcgaacttctttatcgactgtccacctgataggctctaa

SEQ ID NO: 84 - DNA, 918 bp, Cladonia arbuscula
atggggcagacgcttataattctcaatgatgcccaacttgcagtcgagatgttggacaagcgctccattaactattcttcccggccgcagcaagtttttgctggcgaaatggaagctgaggcctgtcacttcctactgcgtgtactggataagccagaaggcctcatagaccatattaaaaaacaggcgggatcgctaattctaaggatcgtctacgggtacattgcacaaccagatggaaatgacccccttgtggatttagttagtaaaaatatggatggcttttcacgtgccgttgttccaggggcattcattgtagacattctaccatggtccgagatgaccaagcggccttacgaatttgttaagtatcaaatagcccagggtgctgataacacatcattacttgcacgactgatacaggcaggggagaaaaactcggaagagatgttggcaaaccgctggtcagctacgtcgctctattctgggggttctgatacgacagtttcctccatgcaatgcttcttcctagccatgagcctgtttccagatatccagcacaaggctcaagacgaaatcgatcgtgaagtgggccaggatagactacccacgatgtcggatcgtgaaaggctgccgtacatcgaagcagtagtgcaggagacactacgttggcatccagtggcaccgatgggtcttccgcataccttggctgttttcacaattagcaagggagctacggatatgaaaaacgcgacgatgtctcatttcacgccggggattattagtcggccaaaacactttgaatgttccgtgaaactgcgatctcctcgccatgaaacccttatccggtcagctgaacagatttatccttgggaagacggccatggcagtgcactagagagagagtctcgtcactaa

SEQ ID NO: 85 - DNA, 1611 bp, Cladonia arbuscula
atggcagtcgactctcccactctagatgccctcgttataggcgcaggcttcgcaggcgtatacctgctaaagcgcctccgagatcgaggcttcaatgttaaaacagtcgacgtcgcctccgactatggcggcacgtggtactggaaccgataccccggtgcccgcgttgatagtaacatacctgtctacgagttctccgatcctttactctggaaggattggacatggaagcaacgcttccctggagatgaagaaattcgcagctacttttcctatgttgcagagaaatgggaccttcgaaaggacaccgagttcgatacctttatctcttcagccaaatggaacgagagcagtgctacttggaacgtatcaagcaatgatggcaagaaatacaatactaggtatctccttttgtgtacagggttctcagccaaacgctacacaccggattggaagggcattgagacgttcggcggcacatggcttcacactgcttcctggccaaagcaggaacccgacttgcttggaaagaaagtcgcgataattggcactggggcaactgctgtgcaggtcacgacggaggtttgcaagctcgctagcgaactggtcatcttccaacgcacaccctcgcttgcaatccccatgggacaggtcaactatgagaatggcgagcaagcattttcaaaggatgaatacccggccttttacaacgatcgcaaggaaatgtatggtggcgtcgccttcacattcatgaaccgcggggcgtttgaagacgatgccgagactagactcgctacctatgagaaactgtggaatctagggacgctagagtactggctggcaacgtacaaggacataatgataaacccagacgctaacaaggaggtatatgacttttggaagtcaaaagtgcgcgctagaatcaacaatgctgctcttcgcgagatcctggcgccagaggagcagccgtattactttggctgcaagcgtgtgcccctggaaaatggctactacgaggcctttaaccggccggaagtctccctcgtagatgtgaacagcacgcccattgtcgaaatttccaagaacggcatcatcacttcagaaaaagagtggcaatttgactacgtgatatgcgcgaccgggttcgactgcttcactggaggtctagcgcagattgacatccagggcaccgcaggcgacaggctatcggaaagttggaatgatggcggcatgaagacatatctcggtataactatctcgggattccctaatatgttcttcacgtacgggccacaagctccgacgccattgtccaacggaccgacgtgcattgagtaccagagcgacttcatcgtgcaagtcttgagcaatatgcaagacaaaggcctccatcgcatcgaagcaaatgcgtgcgcgcagaagaaatgggttgatgaaatggatgctatcgctgcggcgactttgtttccgcgaacaaagtcgtggtatttcggggacaatgttgccggcaagagaagggaatgcttcgtcttccttggcgggatcccggcatactataagagattgcaaaactgtgtgggggagggattatctgggtttaagatgtcataa

SEQ ID NO: 86 - DNA, 7590 bp, Cladonia arbuscula
atgaagactctagatagcagtgagaatggctcagttacctcattgtgcacaagctttgaggatgatgatgagccaaaggttaatatcattccgccaatggagcccattgcaattatcggcatgagctgccgactgccaggaagcgcacaggacccttctagcttttgggaaatgcttgcgtctggtcgatcagcctgggtaccagaccctggcaagcgttttaacatgcgggctttccaagacccatctcaaaataaggctgatactacaaatgcatgcggtgggcatttcctgaaagaagacgtcgctgcgtttgatgccagtttcttcgggattagccctctagaggccaaggccatggatccccagcaacgactcctactcgagattgcttacgagtcttttcagaatgcaggaattagcacagagtcactctggggttctgatacgggtgtgtttataggacagtggagttatgactatcacgagatccaaacgcgggataccgcctcccctcctctctacctaaccactggtactggtccagctatcctatccaaccgcgtctcgaaccaatttaatctacatgggccgagcttaactgtagatacgggatgttcatcgagcatggtagcattgcaccaagcagtatgcagcttacgtagaggagagacatcgatgtgctttgtcggtagcacaaatcttctcctcgatcctcaacgattcgtataccagagcaaaatgaatatgttttcaccagatggacgatctttctcatttgatgctcgtgccaatgggtacggtagaggcgaaggtattgcgggcctgatactcaaaccgttatccatagccaaacgagatggcaactatattcgagcagtcattcggaactcagtgttaaaccaggatggcagaacgcaaggaatcactgtacctaacgaagaagcacagcaacgcgcaattctgaaggcgtatgaagaagcgaatctggaactatttgctgactacgtcgaggcccatggcacaggaacaaaagttggcgatccaaaggaagcttccgccatcgctgccactttcacaaaacaaatgacgcatggccttcctctacctataggatctgtgaaagggaatattggacacacagaagcgacatccggccttgctgcaataatcaaagttgtcctcatgcttgaaaagggcatgattccaccgcaggccaactttaaaacggccaatcctgatctgcatcttcaagagcggcagctccgaattcctgtgaaactcgaaaaagtgccactccgtagggtatccgtaaataacttcggatacggtggaacaaattgtcatgttgtgatagacgcagcaccacctatatcttcatacgatacgcgcataaacgaatcatctcaaaattatcaccgcatatttttcgttagtgcagctagtgagaagtcatgtcagagtatatgcacccggttggcaaaatacattgtgaaggagcatcgagcttcaaacaacactgacacaatattatctcggcttgcatacactctcaacaaccagactattcacgctcatcgactagccctagttgcttccaacttggatgagcttatgtaccaactcagcgaggcttcaagtgcctcaattcctcgtcaagtgacccaaaggcagccacgcattgcactaatatttagtggccagggagcacagtacgcagagatgggcctgaagcttctggaaactcagaaactgtttgctcagtccatggagcgatctggccgatatttgaagactctgggaagttcatgggacttgctggaggagctccgtaagcccaccgagcaatcgtgcattaatgagccttctatatctcagcctgcttgcaccgcgattcaagtctctcttgttgaattgcttaatgaccttggcatcacagtatgtgcagtcctaggtcactctagtggggagattgcagccgcatttgctgctggagccctctcatttgaagatgcattgtctgcatcgtacttccgcggcaagcttgttgctgatgcgatcaaaaactccgccaatcctggtgctatgctcgccgtaggtgctgatccagccactgttaataagcgaatcaatgatattacgaatataaagggccgcatgaggattgcctgctacaacagccctgcaagtgtcactgtatctggtgacactgaggcaatcgggcaactccaagccatcatggacaaggagagctgtttcaatcgaaagttatcaacaaatggagctgcttatcactcgtatcagatggaacttgtatccaaggattatcaagctgcacttgacaggacattcacgtcgagacaagaccataggacaaatggcaaaaccactcgcatcttcagcagtgttacaggtgaagaggcggagaagagtacaatggccaattctagctactgggtgacaaacctactcaatccagtacttttctgccagggactagaggtcatgtctaaggaaacatacgaaggagaacatctcgatctcattgttgaagttggcccccactcacaactccgagggccagtgcaacaaactttgaagcagataaaagttagaggcataaatgatattgcctacacaaacacactaggtagaggagaagactctcggatctctatactcaaattcttggcaacacttaaggtcaaaggctctaatgtgagtctgaatcggatacacggatttacaaagactgaacacccaattcctctgattaatctcccaccctatccatttgatcatgaggtgacgtactggcacgagactcgagtatcccgcaattacagacaaagacagcatttgccacacgaactcttgggctctgtcgtgttgcataataatcgaatggagccgacatggcgccatttcttgagccctaaggagtcgccttggctgctcagacatttaatccaaggcgatgttgtatttccaggagccgggtttattgtaatggcagagcaagcagccaaacaacacatgctatcactcaaccttgattggaaaactaaaagtgtgaaattccgcaacatcagcatcaatcaggctcttgtgttttccaaggatggtccagatgtcgagattgtcctctcactacgtccggaagcgcggacggcgcgcgagtcatctaaagtctggaatgaattcagaatattcactgttacatctggcgacacgtggatggaacattgccggggactagtgcatgtaattggtgacgcagaatcgaatgatgctccattcgatgacggcaagagactggctgatattagcgagaagtgcactcacaaacataaccctcaaaagttctaccacctcagtcgtcagttagggatagattggaaagacccatttaataataccttaacaattcgcactggcaagactatggctgttacaactgctcggggaattttgaaggacgttgatcatggaggagttggtgatgtgattcacacaagcctgttggattcatgtttattccatggactttgtgcggtcaaaattttggaaggaggcgctacttcatcatttgttcccttctttatcgaagagcttgccatcttgaaccgactcatgcaatccagcgacctagtcagcacatctaccattggcagggacgggtctgggtttgatgtatatgtgcaagattcatccacatcaaattgtcctgtggtcatagaggctcatggtgtgcgaaccaaaactttgccaggagacaccggcctgagtgagtatatcaagaatatatcccacagccagaactgggtcacatttgtggacgcgtggacggcggagcatcgtgatcaaacttgcaaggtcaatgtaccccctggaagcgctacaagtttgaaccagattctcgatactctttcgcttcatttcgttcaaaagactctcaaagaggtttcccccgatgtagtttcagttgctcatcgtcgtcatttccttgaatggatgcaggaaaagataaaactcacgccagaaatctcccaattgccaagcattccaaagaaaatgctggaagattcgttagtacagggtgtccttcggttagggccagagttacagaggatccttaccaatgatcttgaccctctaactttactcactccagacaaccttctcggaagactatacaacacagagcgtgcctcacgatgtatatctcaaatggcagaatactgccatgcgctaggtcaacagtgtgctaagttgaagatcctcgaagttggtgctggtacagcctctgcaaccatgcccattttggaggcactgaatggtcgaggaaatcgttatgcctctaggtatgacttcactgatatttcacctggcttctttagtcgagctaaagatgtccttggagatcttggagatgccgttgaattcagtgtattggatgttgagcgtgacccaattgagcagggctttgaggagtccagttacgatctcattattgccagcaatgtcatacatgctactaaatctatctccaccgtcgttctcaacatgcgcaagctcctgaagcctggaggcaggtttatgcttatggaacttttggatccggatgcactatattacaacctgatattcggtgtttttgagggttggtgggctggatatgatgaaggtcgtcgcttgtctccgctgctcactaggtcccaatggacttctaagctccaactctgtggatttccagaaccggagctattgtttgaagactatccggaacagaacggtggtactcttggagtattcgtaagccgtgcacctgtagatgtggcaccaggtggtcggcggccgccaatccacgttatttcgaaaagactggaggaatacacatctggccttcaggatacacgcatcaacctcttgaagaaacagtttgccgattctgggctctcagtccacgatgtgtctacaacttcacctggcggaaatatatccatcataatgcccgatgtcgccaagtttatttgtaataagcctgatgaggccacttggcaaagtttcaagagttgggttctgaaagctcaagcggttatcctgatcgaatgtaccccaaccaagggtttggacgaatctagtcatgggatttggcttggatttgctcgatgcgtgcgaaaagagcgtccagatatacatattgtcacattggatcttgatgtgcaggccacaatgctggcagagcggcttattacggtacttccacagttgttgaagactatgccgaatagtacgagtccacagagtaaaatcgagttagaagacgagtttgccgagaaagatggacagctctttgtctcgcgccttgttcataacaacaaggcgacagattacatccactgggatagaaatcgtgcggagattgatacggtggactttgtcaattcagatgatacgttaattgctgaacttggaaccctcggactcatcggaagccttcgctggaagtacgacgaagcagagacatctcgtgtgtctccgaacgacgtcaagatagagctcagagcagcaagcattaactttaaagatgtccttattgctgcaggacaacttgagggactcacagaaatgcgcaacgactgcagtggtgtcgtcgtagatgttggctccaacatgcgagacaggtataaagtaggggaccgcgtttgcgccctctattctcgttcgtacacaaactatcccattgtccatggtgactgttgtcaagcgatacctgatgccatgtcctgggaagaagcggctgcaatccccgttgtttggacaactgtctattatgcgcttgttgatatggggcgactgttaaaaggagacagtattctcattcattcaggtgcaggagctgtaggtcaagctgctataatgctcgcacagcacatcggtgccactatctatgtgacagcgggtagtgatgctaaacatgacctgctgcatgacgagtacaagattccgcgtgagcatatattttccagccgaacaacctcgttctttagtggtatcaaggcgctcactggaggtcgcggcgttgatgtcgtcttgaactcgctcagtggtgagatgttccgtcactcgtgcaacatcgttgccccctttgggcgatttgtcgagattggtcgcaaagatctcatggatgacgcgaagatgccaatgagtttcctcctggacaatatttccttttcctacgttgacatggcattgatcatggacaagcaaaagccgctagcgagacgattgttgcatgatgtgatggatcttactgataatggcgcgattaagagtgtcacactatctgtaatgcctatttctgatattgaggatgctttccggaagattcaagctggtaagcacacaggcaagattgtacttcaagtcgcagaggaccagaaggtcaaggctgtcccaaaacttcctgaacaagcaaattttagacatgatgccacttacaccattgctggagggcttggtggccttgggcgggctattatacagtggatggtggagcggggtgcgaagcacattctttgcctatcacgatccggtggatgtgatgagcagagtcaggtattcctcaacgagatgcatgatagaggcgtcaaaatcattgcccacaaatgcaacattgcgttggaagatgaagtatctggcttagcacaagtagctgcgaaagcgggtttccctgctattcggggcgtgatacaatgcgccacggtggccaaggatgcgccttttgaagccatgaaggcttccgactggatcggatctttggcgcccaaggtggatggaacgctgaacttggaccgcgcctttggatcagatatggacttcttctttgtcatttcatcagccgttgcacttcacggcagcgggggactgtctaattatgccgcgggctgtagtttccaagatgcactggttagacgccgtgtagccgccggaatgccatccttctccatcaacgctggctcaattcaggaggtaggattcgtcagtgaaaatcccgtcgcggctgcagcacttcaacaacatggtttgggcgcgattagtgtcttggatttactcgccatgcttaactatgctatcatgcatccaccttctggcaatcctgcggatagcgtttgcgccgttggcttgttgcctaacaacgtggacaattctaacttgtctgcaaggcgatttgcattcctacagcgtcaaaacattgccggctcttctgtctcaaaggaaaacacgatgagtgaggtggctctcctgcatggcgcaatgcaccacgatgaagctattgcgatcgtactgcgcgctatactaaaacaactcagcaagctcactgcagtgccaatagagtcattcaatgcagctcagccaatacaaagctatggcgtcgactctctggtggcagtagagcttcgcaactggataggggtatacttgcaatcgaacctacctttgatggtgctgaggggcgcgagcagcattaatgagctcgcgagcataactgcaaaggagtcacggcttttaagtgtcagtggctaa

SEQ ID NO: 87 - DNA, 1449 bp, Cladonia arbuscula
atggatacgaaatctatcaggcctatgattccctttggggaggaagttattcagctctccgctctggatcaacaagcatcgcgacgatatgtcgataacttgctagtatttggactggaaggaaaagaaaaagtcaaggatgtagtccagcaactcgaacattctttgagaatcactctgtgtgaagttcctgactttgcggctacattggttcctgtgctagattccgaaaagaaagagttggaactatggattgggcctatgtctggtgttcaactgaggatactggatcatgatgataccgcagaagtcaatggaagaagcccacttgcaggccgaagcttcttgaagttggacgaagaaaggtttccctttggagcagaatgcagcgacttccttttttaccctcgtgcaggcttggaagtcgaatcttcacaggaacttccagcggtactcatacaaatcaatttagtccaaggagggctattcattggtgtttcctttcatcacaccctctgcgatggccacagtatggatttctttctgaacttatgggcaaaaaatacacttaattccaccattaagacagtcacaaatggtcgggtcatgcctctttatgaccctcaaggtagatggcaactaagtcatggttctctcaatgtggccattacgcaactaccagaatactacataaacccctctagaagggatcctcagcgacggacaacacatctattagatcatgaagaagctgttaaccttgttccaagcacctggtacatgagtaagatagctttgagttccctacgaaatgcactttgtgatgctggcatcaagcaaaccgctacccacttcacaaacagcgaggcagtttcggcgctcatttggaaacatttaagcctagctcgatcattggataagcttccaggagctaatacatcgttatttgccactcggattgatttcaggcctcggtcaaagccaattattcagaattcctacattggcaacatcaatgagcctcacgcaagggctcgcatgccactgagtgaagtgtgtgctccctcgacaccccagtcattagccatactcgcaaatttaatcagtgaagcagtcataaacttagacgacaaaatgatgcgtgactttatcggcctggtgcaggcagcaccagccgtcacagatgtgatactggacgctgatacttttcctggcccagacatgattgttaccgatacttctagtctacaaacactccaccagaactggggtcaggaactcggccagccgcttgcgatacgtacgggatttcgtgaaaagggggttgtgatattatccccgcaggatataagtggaggatttgaggcgcagctgaactgtactggccttgctctagaaaacctaaaagccgacaagttgtttacgaaatacgctacattcaggtgctaa

SEQ ID NO: 88 - DNA, 723 bp, Cladonia arbuscula
atgactccgttccacatcggctcactatgttacccataccaaactgtagatgttgttggcccactcgacgttctcagtagcgccggtcaagaatgttttggcatttgtcaaacatacagcccgacttttagcaaagaattagcttcccaggtccctgaatttgtctaccatcatattgggctcacattggacccagtatcactcacaggtggcttcgttgctacacctaccacaacggtcgaggactgcccagaactagactgtcttttattaggtggaccggccccccatttatatcaggtcgatcctagatacgccgattttatcagacgccatgttgccaagggaaaattgctgtgggccaactgcactggcgcatacgttgctgctagtgctggagtgcttgacggaaagagggctactgtcaatcacgttgagcttgcatgggttaagcagcattatccaaaggtaaactggactatggatgcaaaatgggttgtggacggtaatatttggactgcagctggtgcttctcggggcatggacatggctgcacactgggtcaaaaagacttatggtgaggagatattcaacttagcaactctgtctcttgacttcgaaccaaaagaggcggacggtgtcactgacactatagctaagcgttacgacgctgatggagtccagttacctacgcatgtattcgtgcattatccttcttattaa

SEQ ID NO: 89 - DNA, 930 bp, Cladonia arbuscula
atggttggcactgttgccgacaacttcagcagaagggttttacttcaggctaatattaatagcctcgacgacagggtggcgttaggcaacgataatttcgaggagatgacagactatttgctcaagatagagatactttccggcttgctcatcaattattccaatacacgaaccggtcttcaagcacagctgagcgttctagtgagtcttgaagttggcctagatgtgttgaatggcaagtttaaaaagacagtggccctcgttaatgagcctgctgtttatatatctgcgactatttccgccaatgagggccacaagcgcaagggagttgagatccgcacgggagttagtaatagtatctacgttgctgccttggataattggaactgtgtgattcgaagtggcgtcctttatgataaagggcttggttgtttgacccgtctctctcagcccctcgcaccaaaagacggacttccgcaggacggggcagggacgtctatcctcgtttctggtgcagacgggggtgtctacttggtgcccacaacagagacttacgatgtcagtgcaccatggggaacaattaatattaacactccaacagtaaatgtagacgtatttggccgcatcttgtcatttcatgaagcaacagaatctgaccccttgggccagattcctgtgggagtagcagacgtgaaagtctcaccgcccgagagggtgccggaaaaggatcgcgtggcaggactcaccacgcttgaggcttcaggagtgaagtataatatttacggcatcgccctgccaacgtctgaaaattttgttgagaatcactaccatcccatcagaatttactatcctactgtgtgccccactgtcaactgtctgccaatggaaaaaaagttcctgatgtctataattattgcatacgaactttaa

SEQ ID NO: 90 - DNA, 813 bp, Cladonia arbuscula
atggcttcaagaccaaacatcgttctaatccatggcctttggatgactccttgctgctgggacgactggatcacccacttcaacgctgctggttataccgtcatcgcgccaggctggcctggcatcgactctcgcacaccccaaaacatccgccttgaccccagtgcactagccggtcttactattcgccagattgtcgaccactacgcctccatcatcatcgccctccctacgccgcccatcataatgggtcactccttcggaggacttttcacgcagatcctgctctctcgtggccttggagttgcgggcgtaggcatttgtcccggccagccctctggtgtcattgcgcttaagccgtcgactattaaagccggctttggggttttgggtcacccatcgacctacaaggccgcagtacccatcaccgagagccagttccactacgcgtttgggaatcacctgagcgaggcggagtctaaggatctgtggaacaagtattcaatcccctcagccgggcacattttgtggcagggcttaggaggcgcgttcacttcaacgactaatgtcaagtcggatggacatgtgaactttgcgaaagaggatagggcgcctctattgctaattgggggtaccaaggacaacgttgtaccgcaggaggttgtaaaggcagaactgaagcattacaaaggcccggcgttagttgatatgaagatttttgaggggaggagccatggcatcgtgaatcaggaggggtgggaggaggttgctgatttcgctctgaaatgggtcgaggcgcacattggaatttaa

SEQ ID NO: 91 - DNA, 1947 bp, Cladonia arbuscula
atgaagtggtctgctggatggggttctgcttgtgacccttgcgcgaaggcaaagacgagatgtatccgctcccaggaggagaatggcgcaaaatgcaccaggtgtcagagcctcgacgtatcctgcacagagcaggctcgcaagcctaggaagaaaagacttcgccaaaatgcatcgactctgccagactttgcaattccacagctaggtcaccaggatggtcatttcggcagtaccactgagaaccatactcccccatcacgaactgttcatgccagtgtgacaacgaacgaggacgagcgcaatcatgcagcagagccagaggcaaatgtatacactgcacaagccaaggccgtagtcgctggagctttcagtgctcttacttcattaccggggtttcatccattccctaatccgacttgtacctgtttgtgggagatagatggcaagagtcacctggaagccatggaatccgacgaagttcttctctcgatatatcgtacaaggctgagtccccagtttccgtttgtcattattccggatggtgttaccgccgtcgagctgcaaaataaccgaccgttcctcgcaaaggcgatccggatggcggcctcgctacgtaatcgtcgatccatgtgggatcaaagcagattgatgatgcggcacatatccgaagcagtattcatgggcccagataggtccctggatctcctgcagggcattattgttttcctcggcttttatcattacttctgctttgcccatggacacttcaataatctcgcgcacctagcttccagcatgattgcagacatgaggctagatagaccacgagctaggccaccttcaagaaatatgcgcattctcgggcttgacccagaggagcccaaagcaatgtcaaatgatgagaagcgggccattcttgctgtctggtacataaattctagctctgcggtggcattcaacaaagtgaacgccccaaacaggcattttactcggcacatggagcgattcctccacgacttgcaaaatggacccgagtatgagacagacgacgtcgttgtacagcttgttcgtacacagcgcgtgaatgagatgatagctcaactccaccagagcgaccagtcagtcgatgttcgaccttcttcaaatatctggaccgccaacctcgacaacctcttatctgacttgaaagagctacggaattttgaggaaccgcagctcgtggatatagacaacttccgaaatgatgaggcaattgctgccttgaaacacacgccggactactttcgtacgacctcaaaaagccaaaaggatgcggcgcatactgcactgaggaattggttcgagggctggctgacaataccaatttgccatttcttctacatgccaatgtcaggatacttgcagctcacgaatgctaccacgatccttcttcgtcgatctaggctcattctgttgactcgccataggctgggagactcctactcgcctgagacggactctaacaatgcttcatctttcatgtgcaccaatgccagcaacagctcggatgacctgatgctagaccttctggagcgccttgcgtctcgatttgaacaggcaagaatcgaaatggccgcagctcattgtctcgaatgggccaatggcttcttagacttggtagcgtggaaacttcgggagaggaaagcgtgcatcgaaaagtgggtgaaaatcatcgccaccgaagcacagtccaacactctcagcagtgttcagatagagggaagtcaaagacccggccaagcgtgcggggatgaagacaagtcgactgcgacccaaaccgtagaagaagcagctctgtggttggatccacttgaagcaattcttctaggcggcgatgcttatgaggattggctatgcacgagtgcgcctttttctagggcaaatcctggctgcgaagcctcttaa

SEQ ID NO: 92 - DNA, 1176 bp, Cladonia arbuscula
atggctgattctaaagtttatcgcgcttccactatggctcccgtcaatattgccgttgttaagtattggggcaaaagagacgctaaattaaacttgcccactaactcttctctgtccgtcactttgtctcaggctgatttgagaactttgactacagcttcctgttcagcttcttttgttgatggcgattctttgactttgaatggagaagcttcagacatttctggcgctagaacacaagcagtttttagggaattgagatctaggcgtgctgctctagaatcttccgacccatcattaccaaagctgtctactctgccactcaaattagtttcagaaaataattttccaactgctgctggtttggcttcttctgccgccggtttggcagctttagtccaagctattgctaacttgtatgaattgcctgactctccagcttcattgtctattattgctaggcaaggttcaggttctgcatgtagatctttgtttggtgggtatgttgcttggagaatgggtgataaagcagatggttctgattcacaagctgaattagttgccccagcttctcattggccatctatgagagctttaatattggttgctaatccagacagaaaggatgtttcatctacttccggcatgcaacagactgtcgctacttctggtttgtttcaagagaggattactaaaattgttccagctaatatgactggtatggaggaagcgatccaagcccgtgattttgctaaattcgccgaaattaccatgagggactcaaactctttccatgcttgctgcgccgatacttatccacccattttctatatgaaagatgttagcaggtctgctattagagctgtcgagtctattaacgctcaagctggcaaaactattgccgcctatacttttgatgctggtccaaattgcgtcgtttattatcaagaagaagatgctccaactgtattgggtgcttttgcaccagctgttcaagctaaatctggttggaaagatggtttggtttctggttctacctctgttaaactagctgaaggtttgaccgctgctttgtcagaaggcttgaaatctgttattttgacttcagtcggcgagggtccaattagaactgatgaattcttggttgcagaagatggacaaaccgttaaaagataa

SEQ ID NO: 93 - DNA, 9399 bp, Cladonia arbuscula
atgccaatttctgaacaagatcatcaaactggtgcttctggtcagggtcctccatgtccagatcctattgctattgttggtatgggttgtaggtggccaggtggtgtgagaaatccagctgaattgtgggagttgttaagagaaaaacgtgatggctgggctgaatttacttctgatagaattaatattgatggcttctatcaccccaatggtcaaaggccaggatcaatgtttaccaaggctggacatatgttgcaagaagatccccgtttgtttgatcattctttttttggtatatccgctactgaagctacttctatggatccgtcccaaagaaaattgttggaagtcacttacgatgctgtcgattctgctggtgttccatttgacaggtttttcggttctcgcactggtgtgtttgttggcaattttaataatgatcatcagttgatgcaatttagggatccagatcatactctaccatacgttgtcaccggtggcggtccaactattttgtccaatcgtatcaattattgttttaatttgcagggtccatctctcatggttgataccggttgttctgcatccatgtatgctctgcacttggctattttatctttgcacaatggtgattgtgatgccgcaattgttgctggtggtaatttggtcttgggaccagatggtcaagtttttacaactaaattgggtgctttatctccaacttccaggtgtcatacttttgatgctgctgctgatggttattccagagctgaaggttttggtgctttgtatttgaaaaaattgtctgatgctagagcttctggagatccaattagggctgtcgttagaggtacttcattcaacgctaatggaaaaacaggtggtattagccatccatcagtcgaaggtcaagaagctgttattagacaagcttataaaactgctggtttggatccacatttgactggttattttgagtgtcatggtactggtactccagttggtgaccctattgaagtttctgctgtcggtaaagtttttgcttcaggtagaagagatgaaccattgttgattggttccattaaaccaaacctaggtcattcagaaccagcttctgctatgtctcagattatgaaagccgttttgagcatggagcatggcgaaataccagctactattggaattgagaaattcaatccgaacatagattttgaaggtgctgctgttagggttgttactgaaatgactccatggccatctcacttgttgagaagagtctctataaattcttttggttatggtggtgcaaacgctcattgtattcttgatcatccatctgtattgttgccaggctacgaattgcatggttatccattggctaggtcttctagaacaaatggtttgaggttgctgaatactaatactcatatcaatggtaataccaaccgcgttatgggtggtcatacgaattctcacggtaacattgctaccgatggacaagttaacccatctgtccaaaaagatattaccactgccttggatcatcactctattggtactgcacatgctgatatcggcaaagatgaaaatccatatactaatggtttcactgacgttcatacttctcgcattccaaatggtgctaatggtcatagtttctctccatgcagcatggaatttcctcagttgggatctttggaacaaactgaaagagcaggttctagaccatttattttgctaccattttctgctcatgacgacaatgctttgaaagcagctgttgaaactactccacagttgttgagggactttaacctttctgatttgttgtttaccttaggttccaggaaatcccgctttccaagacgtgctttttcaattgttaaaccacaatctggtaaagctgctccagatgctgattcagttaattatggtaggactccaaactccccaattcgcagaattggttttgtctttactggtcaaggtgctcaatggccagaaatgggtgctaggttgattgatgaatatgccgtttttggtcaatgtctaaggtttttggattctgttctggctagattgcaacaaagaccttcttggactattgttcaggccttgaagcaaccagctgcaacttctcaaattcatgatccagctttttctcaaactttgtgtactgctttgcaaattgctttggttactctactacggcaatggggtattgaaccatctgttactgttggtcattcttctggtgaaatagccgctgcttatgctgcaggtagattgttagcatccgaagctattgtcttggcttattttaggggcttggttgtcgctactaataggcaaaaaggcttgatggttgccgttggtttaggttcagaagaaactttgccatatttagaatcttatggttccgatgttagaattgctgcagttaactctcctgcttccactactgtttctggtaagccagctgctattcaagaattgtcaagaaaactaactgaacagggcgttttcaatcgcatattgaagaccggtgataatgcctatcattctcatcatatgctcccactgggtgaatcatacgagcaattgtctattaaaggtttgcaagatgttgcttctgcctctcaaaatgaaccacgtagaccatctattgcttggattagctctgttacaccagaaaaacaagttcatacagctactccagcttactggcgccaaaatttagagtctccagttttgttttctgaagccgtccaagtcttggcaagagaagaaagaacacaattattaattgaaattgggccccatccagcgttgtcatctccattgaatcaaattaggtccagattggaaaataccggacattctctaccaccttgtttgggttctttacaaaggggtgaacacgatgttgtttctatgttgaatttggctggtaggttgtttatttctgacgccccaattgatttggttgctgttaatgcttccgaagaattaagagacggtagaattcatctgttgcatggacatgcctgtatcgatatgccccagtataaatttacgtatcccgaaaatcccgtctattttgaaaaccgttattctaaggaattcaggatgagaaagtaccccagacatgatttgttgggtgctaggcagccaggttgttctaggactcatccttcatggagaaatgttttgagactaaaagatttgccatggttggatgatcataaattgatcccacatgctgttgttccaggtgctgcatatattgctatggcagttgaagctgctagacagttgcattttgatgccgatgatgctttaccagtcaaatcattcaaactgaggaatgtcgctattaattctaccttgagggttcaagatggtgacttcggtactgaaactgtcctgaacatgaaacgcacttccttaaccaattctaacatcttgtctatttggtacgaattttctatcggctctatggagccagattctggtatttggactgaacattgtggcggttcaatttccattgagacacaatatactactattagggaagaaaataggttgcaagccgacccaagatctaggtctttggatattaggagatggtatgacaagtttggtcaaattggcttgggttatggtcccacttttcaaggtttgtctaaactgcaagcttatccaggtactaatattgctgctgctgatgttgctctaaataccactgctggtaatgttcaaggtggtgaatccgattatgtcttgcatccagctgctttagataattgttttcaattggccctaatttcctgtcatgccggtcaagttgaaaatgtcaaatgtggctttgtcccagttggtgttgatgaaatgactatttggccatctagaactatggaaaggcaagctcatggtttggcttccgctaaacaattgggtgttaggtccttatatgctcgtactcagttgtattctgcttcaggttatccattgctagatattggtgaattgaagtgtgttgcttacgaaggtattgcagataaagctgttgctgctacttcttttccaagagaaccatattggaggccagtttcaagagtcgatgttgatactttaacccaggatactgtcaaagctatgttcgctcccggttctatttctttgccaaagatggaaatgttcgacaaattttgctcttacatactagccaatattaaagccggtctaggtttggacgctgacgctgttaaagaaggagaaggtcatggcgaatttgtttcttgggtttgttctactgcttcttctccagcttgtagacaagctttggaattggaagcagttaaaaggattcaagcaattgatgctatggttgcctctctgtctgatgttccagaagcccagtgtattaagttactacatgacaatttgtccggtattctaaatggtaatacgtcctctattaaggtcctactggagggtaatctgctggatgagttgtacacttccggtatatctaagctgggtggttattctcagatgcaaaagttggtttctttgttggctcacaaaaatccacgcatgagaattttagaattaggtgctggtatcggtggtgctaccgcttgtgttttggatactttgggttctaaatccacttctagaatgtttgatcaattagtcttcactgattctgctgattggtgtttggccgaagctcaaacgaagttctctggccataatggtgttacatttcaatttttggatgttcaaaaagacccagtctcccagggcttcgatgaaaggtgttttgatttgattattgactctggttccctatctcaagctgaagatatgagaaaagctttagcccacgttcagaaattgctaaagccagatggtaggttattgttgcaagaaattactaggccaagattgggtttcgacattttgtcaaggacattgacaggcaaatggaatggcaatgagacttttagggatgaagagacttggtccaaattgttattgcaatctggtttttctggagttgatgtctctttgagggattatgctagagaacaggctatgtccactgtcatgttgacttctactacttcagctaccaaacaatctgacaagaatactattgctcttcaaagggatgtttacttggtttatagggagtatccaccacccctagctagatccattgacttgattttgtcttctcagggttgtaatacgatttacaagtccttgatgtcccattctgatatcccaagaggctcccacatcatttccttgattgatatcgaaaattctactttgttcaccagaggtgaaggctatttttctgccatgcaatctatgattactcaagccgccttggtcatttgggttgcttctgctaatgatatttctggtggtaattctcactctgctgctatgagaggtattttgagatcaatagctacccagcatttgttgttgaaggtcgcttttttcgagttagatgatacccatattactcgaagaagaactgtcgctgaactgatttccaggaaactatccgaattgcataattccactgatgctgataaggcaattgacagagaatgtagagttcaagacggtgtctcctacattgaaagatttttgccagatgactctttgaacgaacaatttcgcttgaggcaaggcttacaagatgaaattcaagaagtttctgttgccggtttgtcaccagttaaagctcaatataagcaaccaggtttgctttcatccttgtactttgcaaacgatgtttccttcttggaacctctaaaggatgattgggtcgaagttaaagtcgaagccattggtttgaatactaaggatattgcagttgtcactggcaaattcgactgggattatttttcatcagaagctgccggtgttgttactagagctggttctacagctactaatttcaaacaaggtgacagagtttttggtatgatgtttggcaacatgggtaattatgttaggtgtccatcctatggtgtcgctaagattcctgatggtgaaacttttgttggtgcttcctctatgccagttgtttatttggctgctgtttatgctttgcaacatttggctaggttggaagaaggtgaatcaattttgattcaacatgcgactggtggtttgggtatggctgttatgaggattgctcgtcatatgggtgcaaaaatttatgctactgtcggttcaggtgaaaaaagaaaattgttgactgaagaatttggtgtcttggattctcatatttttaactctagggacctaggtgctattgattctattatgaacgccaccgacggccatggaattgatgttatattgggctctgcttctggtgatattatgcatgaaacttggagatgtattgctccattgggtcgctatattgatgtcggcagagttgatgttttgggcgctgggaaattgggtttggaagtcttcaagaaaaatgctactttttcttcctttgatatcggttacctgtactggcagaaaccggctctgttgctgaagttgactcaaaaggttatggacttgtggactaagggtgttattggcccaattgaaaggatcactaaatttgatatttccaggctggaaggcgctctatcacatttctccaaaggtgttcatgtgggcaaaattgtcgtcaccttggataacccaaattctaaattgaaggttggtcaactgccacagcgcctgtccgttatttctaatactgttactcaagttgctaagtccgctgacaggaaacattttgattccaattctgcttatattttggttggtgccttgggcggtgttggtagatctctagctgtttggatggctcaaagaggtgctagacatttggtttttatatctagatcaggtactgatagggctgaagcagaacagaccatatcagaattgacttccatgggtgttgagccacaagttttgagatgttctgtcactgatagagaggctattacttctgctgttgccgaagtatcatctgttagaccagttaaaggtgtcattcacgccgctatggttgaaggagatgccttttttgaaaagacttcttactccaaaatccatcgcgtcctggacccaaaagttgctggctctattaatttgcatcatgctaccaaacatttggacttggacttctttgttatgacttcttctatcgttggtcccatcggtactccatcacaaggtgcttacgttgctgctaatgcttttcaagatgctttcgctagatttagggtttctcaaggtttgcctgctactgctttgggtttaggactcattttggaaataggttctgtctcagattctatcggtttccaagatatgctgcaaagaaacgctacctacggcatttcagagacggaattactacagttgtttgaaggtgcattgtgtcagtcttctttgagagaagctaataattccgctctgtctagattggatccaggttgtgctgcacaaatttcattgggatttgaaccagataggtttgttccaagagtccatgatggtagaatggcagactttatttggcatggcaataccaggtttcaagctgtcgttcaatctatttctattagggctcaagaacaagcttcatctgccggtgcagctactggtagagcttcctctatggcagctaaactaaggaatgctagttccttggctgacaaaagagctgttgcaagagatgctgttgttgaaagaattgccaaattggtttccatcgaagctgatgatatcgataccggtaagccaatgaccaggtacggcgttgattctttagtcgcttcagaaatgagaaattggatcattaaatcttttggcatcgacatcaccttgctgaccctactgagcaaggccaccaaaattgacgatgttatttccgcttctgtcgctggtaggttgttttttatcttgggcgcattgtttttggcacaacaatacaatgagattcaatccctggttgcttctcgctccagaagaggtatttttcagtctgctttgcaagatactttacatgccgaaatcaacggctataatcctgccgctacagaaacctgtagagtcatttctaggagagctattggtcatacatcttctactgctccaccaagattgaaaatggctgattctaaagtttatcgcgcttccactatggctcccgtcaatattgccgttgttaagtattggggcaaaagagacgctaaattaaacttgcccactaactcttctctgtccgtcactttgtctcaggctgatttgagaactttgactacagcttcctgttcagcttcttttgttgatggcgattctttgactttgaatggagaagcttcagacatttctggcgctagaacacaagcagtttttagggaattgagatctaggcgtgctgctctagaatcttccgacccatcattaccaaagctgtctactctgccactcaaattagtttcagaaaataattttccaactgctgctggtttggcttcttctgccgccggtttggcagctttagtccaagctattgctaacttgtatgaattgcctgactctccagcttcattgtctattattgctaggcaaggttcaggttctgcatgtagatctttgtttggtgggtatgttgcttggagaatgggtgataaagcagatggttctgattcacaagctgaattagttgccccagcttctcattggccatctatgagagctttaatattggttgctaatccagacagaaaggatgtttcatctacttccggcatgcaacagactgtcgctacttctggtttgtttcaagagaggattactaaaattgttccagctaatatgactggtatggaggaagcgatccaagcccgtgattttgctaaattcgccgaaattaccatgagggactcaaactctttccatgcttgctgcgccgatacttatccacccattttctatatgaaagatgttagcaggtctgctattagagctgtcgagtctattaacgctcaagctggcaaaactattgccgcctatacttttgatgctggtccaaattgcgtcgtttattatcaagaagaagatgctccaactgtattgggtgcttttgcaccagctgttcaagctaaatctggttggaaagatggtttggtttctggttctacctctgttaaactagctgaaggtttgaccgctgctttgtcagaaggcttgaaatctgttattttgacttcagtcggcgagggtccaattagaactgatgaattcttggttgcagaagatggacaaaccgttaaaagatga

SEQ ID NO: 94 - DNA, 1308 bp, Cladonia arbuscula
atgacgattaaaacaactcaaatagtgggtgagagagactctgataagtctctcattctgcagaaggcccgcgaggccctcaagcaaacagagagactcgttcggcaccttgaggctcacggacaccccgagccaaacttcacaacaggctctccagctcatcctgccggccatgactttgacgcaatccgcgtgagccttacggatgccgctcaagacctcatcctcctggctaatggccccatgcagtggctccgtacctttttctgcatccatcatgacctgagcgcgtggcaaaccgccctccgcttcaagtacttctccatcgtgccgctcgacaggccaatcgctttaagagacattgctgcgcaggcgaagatggacgagggccgcacgaggcagatcatcaagatgctagccacgcagcgttgcttccaagagacagaggaggatgtcttcgagcacactgccctgtccgcctttgtggcccgcaacaaggatatcgaggctgtcattgcctttcaagccgatgaaatgtttgaggctgcgtccgtgactgccacgtcaattgaaaaggctcctttcacgtcggatgccgcccatagcgccttcaatctccggttcggtacgagtccttatcagtggtactcggagaacccggaacggggtgctcgctttgcctctgccatggctggcctgggacagatgaatagagatcgagctgagcttcgtgatcgctttccttgggccagtcttgggagccagactgttgtagatgtcggtggtggcagtgggcatatatcgatatacttggcaacgcaatttcccaacctcgattttatcgtccaggatgtcaatcccggcatgttagcccagggtccaaagcggccagaattcacacaggtagagaagcgcgtgtcctttatgcagcacgacttcctgcaaccgcagcccgtcgcggatgcaggactctacttcatccgccaggtcctgcacaattacccagacgacgtctgcgtcaagatcctcagttcatttgtgtctgtcttggagaaggccagccctgagacgagcctcgtcatcaatgacatgattatgccgccggcaaacacagagctcaaagcagaggagcaccatttgcgtcaggtggatattgccatgctgaatgggtatgctgccaagcagcgcacggtgaaggagtttacgcacattctgaaggaggcggatgagcgattcgaggtcgtcaaggttcatggcaagggcatcatgggactgctggaggtcaagctggtgcaaaagtcagcatga

SEQ ID NO: 95 - DNA, 1443 bp, Cladonia arbuscula
atgggatgggccacctctgcggcacagcagcgaccttttactgcactgacgctggccgtcattttccttggtgctgcttcaatagttgcggcagactttctgtccaacttccccaagcgctactatcccatcgccggcgtcaacaagggacagcatatatttcacgagatacaaaaccgactctactggttcaagtgtggtcctctcttgatacacgaagcgtacgaaaagaaccacaacgccatttacgaattgccatcgctggaccgcacatcaattgttctccccgctcgcttcctcaaggaagtcaaagagcttccgtatagtattgctagcaattcacatgccacatcagacttcttcgtgggaacatggacgacgttggactatgacatattcggccacgccaatctggaagctatccgatcccagttcattaccaagattggctggcaagttgccccggccctggatgagttgacctatgcatttccccagcaattcgagagctacccagattggactcctatcgcaccacagcccaaggtactgcagcttgtcgcgcaaatggtcgctcgcactgtcgtcggccctgacatttgtcgaaacccggagtgggtagcttctgtcatcgactacgcgcaaaacgtcttcatggccgccatttgcttcaagctcgtgcccaacttcctcagggggccgcttgcagccttgacgccatacatgtaccgcatatacaagtgtcggcgcaagatcttcaagattgtctcgcccgccatcaatcatgcgctcttcactcgccgacagcgtcccgacgaatgggcgacaaaggttaaaacggagcagatgaacacaattgactggctggtaaagctgtctcccccgactgaggcgactccagagatgattgcccaccgcctgacgggcgtaagtttcggcgcctctcacacaacgtcaaatcacgtcaccaactgtatcctggatctagccagcgatttcaagcggtgggcgcctcctctgagggaagagattgagagtgtgctggggccgaaccctactacaattacgaacgcgaacttgtccaagatgtggaagctggacagcttcatgaaggagacgcagcggttccaccctccatcgaagctctccgtcaatcgaaaaattctacagccctttagtctctcctccggcgaacctctaccacgagatgcccacatctccttccctggcgtacctatgtcaatgtcagaggagtacttccaggatgccagatcctttgacggattccgcttcgagcgcatgcgccacgacacgtcgatcgatcacagtggcctacaattcacctcgtcctacgaggggagtctgcactttggtcatgggagacacatgtgccccggacgcttcatgggcagcctcatgagcaagctgctgattattgaatga

SEQ ID NO: 96 - DNA, 1464 bp, Cladonia arbuscula
atgaacaatgcttgctgtctcgcacgactaccagcgcggccgagctcacgagcctgtggatgggccatcttgagaagcatcgcaggacttcgatgcacaccaactcgcagcattggacgagcagtaccagttacggcatcaatcgagttccggaaacagacgtggaaatcgcgaccatttcacacgcaacatttctctaggaaagcacaagtagaatcagagtctggccacgagcgggagagtacgagtcgacttgcgcgcgcacaatccgctcagaaaaaggccgatgatcgaccttggcagcgggagagcagcaatgccttgccggaatctacttctccagatccatctggaggagatgaaaccaaaggacggctcctcacgacgccgacgcggttgctgaagcttatcctgccgatacccttccaccccgatcaggaattcatcaacgaggacaaggacgaggcggcgcagaaacgaaacagacccccggtcgagcctcttgcgctgctcgtccacccacagcaaccactgtcatacctcgaaaggctgattcaggccgaaataccaccaatcaaggccgacggacgagagaggctgccagacatcttattccacgcagaagccgaccgtgaggagactcatgggaggccacgagatgacaggaccaacgtcgcgtcgtattccgggctcggtagagagggacctagtaggcatcatagcgaagccagctgggtgcgatggagtagcagcaccgaagtgggcgacttcatccgggatgcagcacggggacgtgagttttcaatcgccatcgagggcctggacaccgagcttagggtagctgtgcctagcttcaaagaccggacctactacatgcggacgcgattgcggcgaatgtcccaccagatcgatcaaatgtcacgtatcaagagagaatgcgacctgctggcgcacaagggagcgcatcggctcgccaaaggtggatttgcggctcttgccagctggtgggccgtggtctactacgtaacgtttcacacggaaatgggctgggatctcgtcgagccggtaacgtacctggctgggctgactaccatcatgggcggttacctgtggttcctgtttatcagcaaggacctcagttacaaggcggccatgaacattaccgtgtcaaagcgccagaacgtgctgtaccaggagcgcgggttcgacccaagcaagtgggagcacatcgtgcacgaagcgaacggcctgagaaaggagatcaagatcgtggctagcgagtacgacgttgactgggatgaggcgaaggatctagggggcgaggaggtcaagaaggtgctggaacgcgagaagaggagtaaggatgatggcaaaggacggaagggcgaggacgaagaaggggagcagggggagcaaggggaggaagagaaacctgagccggaaaccaagtccaagaaggaataa

SEQ ID NO: 97 - DNA, 1635 bp, Cladonia arbuscula
atgccgcctcaagtcatccatctgccagatgggcagacctttaccgtgacgccggtctttggcggagtcggattcaagagtcacgagctgacgacgcaccaaaatgcatttcccattgggtggacgacggtgctgcacacagaagacgacccgaagccctccgacgacagcaagttcagttctcccttcagctctaccaacgaccttggccaagatggtggcagtggaggcgatggcgacggagacgacgatctatccttaggccgtcccagagccaagcgacgcacgcacccattcacgaagccgacactgcaaaacgacaccctcttcatctcctccatctccaaccccgccaacagcgagttcaagcccgccgccagtcccacgcggcagatcgccatgatgatgtggatcaccctgtattggtactttcatcaacctgaacccagtcggacgatgtatacggccgcgtcgagcgacacgcctcgtgctgcaaagcccaatggagagtggaagattgctatcaagcgcgatggggtgctgcgcggccgtaacctgataccgaagctggagcgcatggggcttattgcctcagaagacacggctgtaggtgtcagccttgacgacagcggggacggctgggaccgcatgtttgctagcaagcgaatgttttggcagacgcccggcagactgttccttttcactctcgctccgaaccggtcgttatcgtcattccctggatcgccagcaggcagcaggccgggttcgccagttcgaggagagtcaccgcatggattctatcgccaaacccattcgcactcgccgagctcgcattcgcgcatcgattcggacctccctggtgcgcccatgccaacgaccttggttaccagtccgagttttcccatcggccccttcttctcgacgtcacatctcccgacgtactacccaccaccgccgcttcagtacaagctgacgggtggcgtgcgacatcctctacgaccgaagccacccaggatgggagaggtcttttattcacgattcgtaccaagcgtgggacaatacttgtccttccgggttgcgtcctcatcgcccaagcccgtcccgtacctaggtcccaccggcccaaaatctccagagcgccaacacttgtgtactctggccgacacctctctcttgcaaatgtggtttgccaatccgcgcatcagcgagttttggggcaactatacgcccaccttcctctcagatgctctacgcctaaatcactcgtttcctgtcattgggatgtgggacggcgtgccctttggctactttgagatctactgggtcaaggaagacatcctcgggcaacacattggacacgacgccaacgactgggaccggggattacacgtcatgattggtgaagagtggtcgcgtgggcgggttccgacgtggctgactggactgacacattggtgtcttgaggccgactttcgcaccatgaacgtgtgcctggagccgcgagtggacaatgcgaggatgctgcggcatttggacgcccttgggtttgcaaaggaccgccaggtttcgtttcatcacaagcaagcgtggtttatgaggctgcgccgagattcgtgggatggaccagcgttatga

SEQ ID NO: 98 - DNA, 858 bp, Schizophyllum commune
atgtctttgagcctacttcgtcgtgccgcgcatgatctgcatactctgtatctcttcacgaggtccgacttcaaatccatcctttttcctatctccgtcttcgccctcttcacggttgcatacgatgtatcgctgacgaccacaagggtcttgtcgacggtgttctgggtttggattcacctcctccagttctgcgtttcgaatcagacgctctcatccgacgaggacgcgcaaaacaagccttggagaccactccccgcgcagaggatagctcttcgtgatgcactcgtgctgcgatgggcattgctgcccatctgcgcgctcatctgcgtcgcctacgatctcaaattcatcgcgttatggttccccttcggcgtcattatgcacaatgagctgaagctcgactcacactggctcacgcggaatgtgctcaacgcacttgcgtactgcaccttcgacatcggtgcgacttctgtggcccgtggcgagtaccacggcttcgcttcaaagaaggccttcaacacccacatcttaaccttcctaatcgtcctcacgacggtccaggctcaggactttcgagacgaagagggcgaccgcaccgcaggccgacgcaccatccccatcgtcttcccgcggttcggacgccccaccatgcttcttgccatgatattctggtccatttacatcgccacgcagtgcgagcttccggccctccttgcctcggccatcctggcgggcggcgccttcgttggagtgaggttctacctcttgacagacgccgcctccgaccgcaagtcgtacctgtactacaacatatggctcgccaccgtgcggattgcgcctttcatccgcgtttga

SEQ ID NO: 99 - DNA, 1515 bp, Schizophyllum commune
atggctccctcccccatcgtcctcgccgccgcctgcgtcgcgctccccgtcttctgggtcttccacactcgctcgccgctccccgcgctcccctaccgcctcccctggatcggcaacctcctccagctcatcccctggcgcaacaacgtcgtcggctggctagagcacatccaggagcagtacggcgagatctgcgagctctatctcccactgtggggcagaatcctggtcatcggccacccggcgtggctgcaacatgtgaagcagggcgacacggataggtacagccgggggcctatcgcgattggcgtgttcaaggagtttcctgggccgaagacgcctgttgcgagtgagggggcggagtggaggaaggcgaggaaggtcatggcgcctatcttctcggtcaagtcgttcaccaatcacatcagtcattcgatgcgcgacatctcatcggtgacccgccagttattggacaacgtcgctaagcaggacggccttgtcgattggaatgatctctgtggcaagatcgcccttgagatcttttgcatgtcatgccttagcatcaagacgaacaagctgcgcaccgacccggaatgtctgaaggaggacgactacctccgtgactgcttgattgcggtcagccagacgtcggtgaagcgcctcttcaaccccttttacaagtggacggagctgctctccggcgaaggccgcaaattcgagacgtcccgtgcccatattcgtgccctcgtcgacgacgtcgtcgccaagcggcgctcctcagaagacaccgacggcgtcacccacggcgactacctctcgcagatcatcaacgaccccgagtacgacaacgcggagctcctgcgcaacacgctcgtcgtgctccttttcgctagcggtgacaacacgcgcaacagcctgacgtggtcgatgcatgcgctgctgcagcacccggagtggatggagaagatgcgggaggaggcagtgaggaatgggcagctgtcggcggatttgatgattgagtatgcacatctgaatcgcttccctattgctatggcagtcttctacgagactgtgcgtctgtggcctggcctgccgaagaatgcccgccttgctgtcaacgacgatgtcctgcctgcgattccggagcacgatttgcccgctgtcaaggtcaacaagggcgactatgttctctggtctgactttgtcatgatgcgcaaccccaaggtctggggccctaacgccgatgtctttgacccctcgcgccacctcaaggatggtgtcttctacaagcctggtcagcccgacttcaatggcttcggatcaggcccgcgcctctgcccggccgcgcagctcgcagcctatgagtttgtcgcgacgtgggcgagccttctgcctcacttcaacttcgaggcggcgtacaaggaggaaccgaagagggacgaggctttcaccatgtcggttgctggccagcttccggtgaagattagcgcgagggatgctgctgtgttcaactag

SEQ ID NO: 100 - DNA, 1149 bp, Schizophyllum commune
atgtcgtggcaaggcctcctctcctcgctgaagaacctgctctcgtacgcgatgttggcgactgtggcacccctggcgcctaaggcgcaccagccggctttgcctgcgcttccgaagctctcgccggaggaggagaagctggagctgcaggacaagcttgggaggtatattcaggggatgcgggagacgttcattcgggacctctcgacgtccaacgagctcctgacggaggtctcgcaatactatgcgaagcggccctcgaagctcatgcgccctcgcttgatccttctgactgcacttgctgtgaatgcgagcgtcggcgaacgcgatgcccttccccagcaggtccgcctcgccgagatcgtcgagatgatccacgttgtctctctcctgcacgacgatgtcatcgacgaatccgacacgcgtcgcggcgacctgtccgcgccctccaagtttggtaacaagaacagcatcctcgccggcgacttcgtcctcgggcgtgccatgtctctcatcgccgcgctcgagaactttgacgccatgcgcgagattgcgggtgtggtcaccacgctggtcgagggcgagatcatacaggcagaggattccatcgcgctcggtgagaaggcgaaggtggggcaggcggcggaccagtggggctcgtatatggaacgcatcttcttgaagacgggcagcctatttgcgcgcgctttgaggagcacggcgatgctctctggcttgccgagcgacgacgagcgggtgcttgcggtgggagactatggcacggagctaggtcttgcgttccagatcatcgacgatgcgttggatttcaaggagacctctgccgatagtgcgggaaagcccacgggtgctgtcgacctgagcctcggactcatcaccgcacctgtcttctacgcgctcgaggaacggcctgatgagctcgcaccgtatgtctcgcggaagtgttctgaacctggcgatacagcggaggtcgtccgcatcgtcagggagacgtcagcgttgccgcgtacctacgcacttgcggcgcaacatgcgcagaaggcgcgtgaggccctccaggtccttcccagcactcccgcgagggatgcgctggaggcgcttactatgaaggtcttgtcgagggatcattaa

SEQ ID NO: 101 - DNA, 1029 bp, Schizophyllum commune
atgtcctacccgcgtcgcaagatcggagacgcaaccttcgggcctctaggatacggcctcatgtgggatgtctacgaccctcaaggcctcacttcctctaccgatgacgagcgctttgcggtcctcgacgctgcattggaagcgggctgtaacttctgggatactgctgacatctatcccggttccgaggaagccgtcggcaaatggctagcgaagacgggcaagcgcaaggagattttcctggcgacaaaattcggcttcgtgcagcgccctgggcatgcgaaggccggagagaagctcctcgacggcagtcctgagtacgtccatgaggctgtcgagcgctctctcaagaagttgggcaccgactacattgacctgtactatttgcaccgagcggatccggacacacccattgagcgcactgtcggcgcgatggcagagctagtcaaggagggtaaagtcaagcaccttggcctttccgaggtgtccgccaagacactgcgtcgggcctacgctgtgcatccaatcgctgcggtccaggtcgaatactcgcccttcacgctcgacattgaggatcccaagatcggtctcctgcaagccgcgcgcgaactcggcgtcaaagtcgtcgcatattcgccgctcggccgcggtcttctgactggacatatcaaatccactgccgacattacggaccccttccgctcatctatccccaagtataacgccgaaaacttccccagaattctcaacctcgtcaaggagctggaggccattgggcagaagtacaattcgtcttctgggcaggtcgcacttgcttggatcctggcgcaaggagatgacttcatcccgataccttgcacaacgaagaatctggagcacaacgtcgccgcgctggacctcaagctaagcaacgaagacctggcctcgatacgcagacacgccgaagagatcgacgccgctttgcgcggcatcgcacgttatcctcccggtgtacaggaaaccctattcagcgagacgccagagctgtga

SEQ ID NO: 102 - DNA, 1341 bp, Schizophyllum commune
atgctgccgtatactgctcctgaggcatatgggagatggaagacgaaggtgcggatatgccacggtcccaccgaacccattcatcgcattctgcccaagccgcgagcgtttagggcctcatataagggccgaaccctcgcgatcacccctccagctcttcaagccacgatctgcgccgctctgcaactcatcatgacgtggaaggtcctctacgccgcgttgaagaacctaatctcgtacgcgatgctggtgactgcagcgcccctgtcatctccgacacaccagcaggccttacctgcgcttccaaagctctcgccggaggaggagaggatcgaaatgcaggataagctcgggaggtatattcaggagatgcgggagacattcatccaggacctcacgacgtccaacgagcttctgacggagatttcgcaatactatgcgaagcgaccctcgaagctcatgcgccctcgtttgattcttctgactgcgcttgccgttaatgcgagcgttggcgaacgcgatgctctgcctcagcaggtccgcctcgccgaggtcgtcgagatgatccacgttgtctcactcctgcacgacgatgtcatcgacgaatccgacacccgccggggcgacatgtccgcacccgccaggtacggcaacaagaacagtatcctcgctggcgacttcgtccttggacgcgccatgtccctcatcgccacgctcgggcacttcgacgcgatgcgcgagatcgcaggcgttgtgactacgctggtcgagggcgagatcatccaggcggaggactccattgcgctgagcgacaaggcgagggcgggacaggcggcggaccagtgggggtcgtatatggagcgcatcttcttgaagacgggcagtctgtttgcgcgcgcgttgaggagcacggcgatgctttctggcttgccgagcgacgacgagcgggtgcttgcggtgggagactatggcacggagctcggactggcgttccagatcatcgacgatgcgttggatttcaaggagactcctgttgacagtgcgggaaagcccacgggcgctgttgacctgagccttgggctcatcaccgcacctgtcttctacgcactcgaggagcgcccgaacgagcttgcgccatatgtcttgcgcaagtgctccgagccgggcgacaccgcggaagtcgttaggctggtcagggagacgtcggctctgcaacgcacttacgcccttgcagccgaacatgcgcagaaggcgcgtgatgccctccaagctctcccaagcactcttgcaagggatgcgctggaggcgctgacgatgaaggtcttatcgagggataagtag

SEQ ID NO: 103 - DNA, 1026 bp, Schizophyllum commune
atgtctgcattcccgccccgcaagattggagatgccaccgttggcgctctgggatatggtctcatgtggggtgtctacgaccccaagagcattgcttccagcacggacgaggaacgcttcgcggtcctcgacgctgctatgaaggcagggtgcaacttctgggacaccgcggacatctatccgggttctgaagaagccattggcaaatggctcgccaagacgggcaagcgcaaggaagtcttccttgccacgaagttcggcttcaagtttagcggggttggcgagtcgtccattgacggcagtcccgcgtacgtgcgcgaggccttcgaccgctccatcaagaagctgggcaccgactacgtcgacatgtactacttgcaccgcgcggacccgaacacccccatcgagcgcactgtaggtgccatggccgagctggtcaaggagggtaaagtcaagcacctcggcctctctgaggtttccgcgaacacgctccgccgcgcccacgccgtgcaccccatcgccgccatccaggtcgaatactcgcctttcgtactcgacatcgaggaccccaagattggcctcctccaggctgcccgcgagctcggcgtcaaggttgtcgcatactcgcccctggggcgtggtctgttgacggggcagattaaatcgcccgcggacttcaccgaccccttccgctcaaacacgcccaaatacagcgcggagaatttcccccggatcctcaacctcatcaaggagctcgagaccatcggcaagaagtacgaggcttcccctggtcaggtcgcgctcgcctggatcatggctcagggtgacgacttcatcccgattcctggcacaaccaaggtcaagaacctggaacacaatctcggcgcgctcaacgttaggctcagcagcgaggacgtcgccaccatccgcaagtacgctgaggagatggatgctgcgctgcgtggtgtcgcgcgctacccccctggtatgcaggagcagctctttagcgagacgccggagctgtaa

SEQ ID NO: 104 - DNA, 2970 bp, Schizophyllum commune
atgttgccgctcttgtccttccacagaactgtgctggaagacatacatgacccaactaccaacgatctgctggtcatcgcgcgagggttgggactgcgccggattgtctgcaacctgctgaagctctatgactccccacaaaacctcgtccttctggttaacgccacgcccgaggaggagtctgagattggggaggagctgggtattatgggctgtcggaagccggggctgcgtgtcgttggctacgagacgggcagcaaggagaggcaagagatgtacaagaagggaggccttatatcagtcacctcgcgtatccttgtcgttgatatgctccaatcccaaatccccaccgaactcatcaccggtatggttgtcctgcacgccgaaaaagtgacagccttggtcctcgaagcgttcatcgtgcgactataccgagagaagaacaaggaggggttcttgaaggcgtttacagaccagccagaacacatcaccagcggattgtcccctctcaagaacatcatgaaggagttgcagctgcgcaaagttcatctctatcccaggttccaagaaggcgtaaagaaggctctcgagagacggcgcgcggacgtagtcgaactgtcccaagaaatgacagagtcgatggccgaaattcaccacgccatcatacagtgcatgacttcgacgcttgctgatctgaagcggtccaacacctcactcgacctggacgacctcacggtggagaatgcgtacttcaggtcgtttgatcatatcgttcgccgacagctcgacccagtgtggcacaaggttggtccgcgcaccaagcagctggtcggggacctggcgactttgaggaagctcttgggatacctgctcacttacgaccccatccaattctacatgttactcgagaccatcatcgagtcaaaccagacgacctcgtcaggcggaaagaaggagcaccactcgccttggctgctcaccgacgccgccaacgtcatcatcaccgtcgcgaagcgcaggtgctacatcatgacttccactaggaaagagcccgttctcgatgacatggacgaagagggctgggcggctttggacgaggtcaacggcacggtcggtcagtcgcaagatacgggcaacaacagaccgcgatggctcccgtcaggggtagagcctgtgctggaggagcttccgaagtggaatctgctggccgacgttatacaggagatagaggaggagctcatccgcatggagacgaatccgcggatgaagaatacccctggaaataacaccgtactcgtcatgacatcctcgacgcacgggtgctcggtgctgaccgagttcctggagagcatggactacagcgcacccgcgggccagcgcggcacgtcaatgctgctgatgaagctcgggcgctacctgtggtggaaagggcggctgcatcagacgaagaaggcagaggggcgaggcgagcagaatgggtactaccgcacgaatacgggttcgtcgacgaataccggaccatcgacatcaacatcaaacatgaacaggagtggcaacaacgctggggtatccgaggcgctacagcggaaggataaggacaggcaggagcgcgccgctagtaggaggcgtatgcgtggggggaagacggcgccagcgcctacaccctcgcggtcgcagtcgaccgctccgagttctgtcgtggacgatccggtcgaggctgacctccttacgcaactcataagccaacagtcgtcgggactggagttcatggatgacggggacatcacgcttctcgattttgacaccgtccagttcgagacggagttcgatgcgaactatgagctgttggcgcctcagcagacagtcgtcgtgcgcccgtactcggatgatgcggacgacatgatgcttgccgagctgcaacccaagtttatcgtcatgattgagcccaacgtggacttcttcaggcgggttgagctctaccgcgctgcgaatcctggactcggtgtacgattgtaccacatgttttacggcaactcgtcagaggagcataagttcttggcgggtattcggaaggagaagaacgccttcgagcggttgatcagagaacgagggagcatgcttctgcccattttcgaggatacacgacaacaagcaggcgacgatgtcatcaagaccatcagtacccggatcgccggcggtcgcagagaattgaacaccgagccgtcgagggtcatcgtcgacatgcgcgagttcaggtcgaccttgccatccttgctgcacgcgtcgaacttgctggtcatcccggcgactttgaccgtcggtgattacatccttacgccagatatctgcgtcgagcggaagagcttgtcggatcttgtttccagtttcaacagcggtcgcctgtatacgcagtgcgagataatgtcagtacattacaaacatccgatccttctcatcgagttcgaggaagagaaggcgttctcgctggagataatctcggacatgaagtcgtacgcgaagcccgtcaacaagtacccgcccaaaaagccaaacacaaaagaagacgacaaatcacctttctccgggcccaccattcagtccaaactcgtcctgctcacccttaccttcccgcgcgtacgcatcatatggtcatcctcaccgtacgcgaccgccgagatcttcaaggacttgaagaaggacagtaccgaaccggacccgacgacggctatcgcgattggcgcggaggaggacccggatgtgggcgcaggcgtcaatacggcggcagaggagctcttgaggtgtctgccggggatcacgcagaagaacgtgaagtatgtggggagcaagatcacgaatgtacgcgagctctgcgagatgagcctggcgcaggtgcaggagcttttgggcgcggagccggggaaggcttgttgggactttctgcattatgggtcgaggaaggagggaagctag

SEQ ID NO: 105 - DNA, 1674 bp, Schizophyllum commune
atgtcacgcgtgaacgtgaacagccagacgacgatcaacgaggtgggcgccgcagttcagggtgaggtcgtcgcgaaaacgcacaagggtccccgattctggctcatcttctgctccatctgtctgtctttgtttgccgcggctctcgagctcacggtcgtcagtacggcacttccaaccatcgcgagcgacctgcacatcgatgagtttacctgggtcggttcggcgtatgctctcgcttctacggccttcctccccatgagtggcgccatggcggaggtcttcggacggaggcccgcgctcctattctgcttggcctgcttcttcctcggtagtggcatctgcgggggcgcaagtaacagctccatgatgcttgccgggcggaccgtgcaagggttgggaggcggagggatccaggccttgggctacatcgtccttgccgacatcacgacgcttcgcgagcgtggcgtttacgcgagcctgttcggattaacatggagcattgcgtctctcattggccccatcgtcggtggcacactcgccgacaaaggccagtggcgctggatcttctacatgaatctccccatcgccggtgtggcgtccgtcctcgttggagttttgctgaatttgcccacgccgccgggttcaatccaagagaaactggccaagattgactggattgggaacgtcatcgtcattgggagcacgacctccgctgctattggacttacttggggcggcgtcacggcgccctgggactccgcgcagactttggcgccgctaatcatcggactggttggtctggtgcttttcatggtgtacgaggcgaagtgggcgaaaaatccactggtgcccttccacgtcgtcaacaaccgcacgagcgtcagcggctatctgcaaaccttcatctcggcggtgggcgcgctctgcctcacctacatgtatcccgtgtacttccaggctgtaaaaaatgcgacgcccatcaagtccggcgtctaccttctgggcatgtctgccttggttcccgcggccatcgtcgctggtgtgatggtgaagaagacaggccgctaccgcccgcagatgctcgttggctggtgtctcccagtcattggtactggcctgatgagtacgctgcacgcatatcacaccgttggccgcgccattggatatttggttatcgttgccgtgggcatcggcgccgtatactcgacgacgatgttccccatccaagcgccgctacctgtgcagtctagcgcgttgtcgctatccttcatgtctttcgtgcgggcttttgccggaatctggggcgtcaccatcggcagcactgtcctccagaaccaggccaacaagaagctcccccagtggttcaaagaccagctaccgggcggcatcgacgtcgcgtactcggccattccacggattccgatgctcccgccggaccagcgatttgaggtgaacgaggcgtttgcgctgagtttgcaggtggtctgggaggtgctgattgggatcttggggttggggctgctgtcggcgctgttgatgaaggggattccgctccacagcgtcgtggatcagaagtggacgatgcaggagaatgcggcggctgccgctgctgacaaggagaagaatatcgagatggaggcggtggttgacgacaagccggtgcatgcctga

SEQ ID NO: 106 - DNA, 291 bp, Schizophyllum commune
atgatcttccaacaacctcgtgggggtggctggcccagggtcaggactgttcttctgcgggccgtgagccgtaataagctgtccgtcctgtcgctatctgcctcttcttcatctttcagaggctcagaagccattgtcttcgtggcttcctcagaccagagttgtgctctattccgacacgaggttgaaaggggacggaaacccgcgcgggtcggacggactgccgagccatcccctcaaagtcttaggtacggtcgtatctctgtacattttcgctgtcgttgtgagtga

SEQ ID NO: 107 - DNA, 888 bp, Stereum hirsutum
atgattcttcttctactgttatcccttcggtccatcttccaactcgccttttatcatgtatacactttatatttattcacttcgactgactacaaaacagtttttatcccggttatggtcttcgcctgctcgaccgctcccatacattcggtcgccaatcttctccatggaggcacatggatatggatgcacctacttatgtgtaatgtctcgaaccaactgagaggggagcaggaagacgctgtgaatcgaccgtggagaccactgccatcgaccagaatgaccaagaggcaagccacggcactccgctggtttacggtggcatcatgtctgctctactcgtccgcctacggccaccgagtagtatacgttactgtcggccttttcttcacaacatatgcatacgacgatctaggcttctcccagagtccgctcggaaagaacttttgtaacgttggtggatacgcgaccttcgagatcggtgccacaaagatcatgggtacacagcacgagctagacactacctcactcacgtccgttcttcttagcggcatggtgatatttaccactatccaagtgcaggactatcccgacatcgaaggcgacgcagcgtctggtcgggtcacctttccgatctatgcacccgagttctcgcgattattcacgctttcagcgatcattatctggtccttcgttttgtcatggttctgggatatcggcatcctgggtcagtgctttctcgcaggattgggagcatacgtcggtgctcgttactatctccatcggacaccaattgcggacaaaaagtcctacaagctcttcaacgtttggctggtgctgatacatcttcttccactccatgcccgcatccgcgtgtttctctattag

SEQ ID NO: 108 - DNA, 1374 bp, Stereum hirsutum
atgaactatatactatcctttgttgttccacttgtatcacttgtgatgctcatattcatacgaaagatgaagcgagacagcttcggtgcacatcaatatcctcctggtccgcccgcgatacccgtgcttggaaatatcatgaccattccgaagacgggagcatggaaattccttctgaagctgcatcgcgactgtggagaacctatcttctttcgcggcttggggaacagcgtccttgttctcaacacaatgacctccataacggatctgctcgacaagcgaggcgagaactattctcatcggccggtattgactgtgctaggggaactgatgggattggatcgtagcatgccgatgttaccgtacggccgtgagtggcgagagcagagaaagctcgcccacgttgccttgaacccctctgccgtgagaaagtactgcatcgtgcaggagaacctagcttctatattagcgcttgatattctcacgtgtcccgagggattctttgatcatgtacgactttacgcggagcgtataatattctccgtggtatatggtgttgatatcgatggttccagtaatgaatatgtcactcaagcagaagaaaccatgcaaattgtgggtgacgcaatggtcccaggggcatttatttgtgatttgttgccttggatgaagtatcttccttcctggttgccttttcgaaagcaggcactttatgggagaagcatgatcgagacccttgttaccagaccctttgaacacgttcaacgagagatgatgaaagatattgctgcgccatctctcactcgagaactattgaccttgcgaaataacgcccccgcgtcttttgagagttccgtcaagtgggcaactggatctttatatggtggtaggtatcagacttggacgtacgccaccatccttactttcatcatggcaatggcaatgaatcccgagactcaacgtaaagcccaaaagaagatcgatgaaattgtagggatgcacagacttcccgtcgtctcggacaagacagagttgaaatacgtagcagccgtcatcaatgagacaatgagatggcatcctgtgttaccgctgggcatcgctcgccgtacggaccacgacgatgtgtacatgggatacttcgtaccaaaagatactgtcgttttccctaacgtgtgggcactcacacggaggcacagcgacacatacgatcccgaaaaattcatcccggaacggtttctcgacccctccgaagcagcggacgatccttccacttatttgtttggatttggaagaagagtctgcccgggtaaatatctggcggacaactcgaccttcattgcaatcgcaactatcctgtctcccaatatgagctga

SEQ ID NO: 109 - DNA, 1425 bp, Stereum hirsutum
atgtttcctcttcccgttacgaactggaccgtagttcacgctgcattgctcatttcaatcgtgctcgtataccgcaggctttttgtacgacggaaatctcctcttgatccgttgccttatccagacgaagaaccagagtggatatggggccacgaaaaacgggtttatgacagccctccagggcaagcgtatttacggtggatgaagagcgttgggcatacttatcgcatttgtgctgcccttggtgccccggacgttctggttcttggtgatacgctcgccatttcttatattctacaagagaaaatttacgactaccggctcaaaccgttaaagacatggaaggcgaaatatttcaagcaatgtctacggctagtcttaatagtcttagatgatctatcacaagcagtcgaggactcggatggtgaaatgggcgtaaacatattgtcatggacgaatcgaatgaccttgaatgcaatcggacgcgtccgtgattcccaggcattcttgtacgatttcgaatccgggaagagtcgcgaggcacagcttatactggacacaaggcgcaggtcgctgaccggtattgctcgatacgcatcgttcttaaccctcatgatgctcaggcggttccctgccctcaatagccttcctgtacccgcccttcaggcgcaaagcctagttacggcaaccataaagtctgtcgtagccaaggagatcatagcgagaagttcttcagcatctgatctccgaactcgaggcaaggacctgctaagccgactcttggtagctcatgatgagcagcacctttcagtcgaggagatgtacgagcacatatcaacgttcttagtttctggacaggaaactacgagccaaaccgtcgcgttctccatctacgagctttcgcgtcacccagagatccagcagcgtctaagagaagaattggacacgtcttacccgtcttccacagggatgtcgcagtcgcagcaatcttatctgcatgccgtgcttaaggaaacactaaggatgtatcccgctcttctgtacatggaacgtgttgccaccaaatctgatagaattccgcttcagactcacatcagtcacggtaaagaccagccgctacaggacattcatgttgaaaagggccagaccgtcatcatcccaattatatctctccaccgctccgacgctatctggggcgatggaaatgtctttcgtcccgagcgatggcttgggactttacctgatgaggcgctgcgtcttccaggatggtctaacttgctttcattcagtgatgggccccgatcatgccctgggatgcgaatggctcatattgggctctctggtcaagaaatatcgcatagaaagcaagaactcagagatagttctcaggatttcatccagtttgcagccttgggtgatagatga

SEQ ID NO: 110 - DNA, 1440 bp, Stereum hirsutum
atgcatcttccattcgcctggataatatcgcttattacgctcgctggaattgcgtgctggatattcaaacggtgtttcacactccggtatctcccgcttccgcctgggccgccaaacaatgtgtgcgaaaatgaacacaagtggatggcttactcacggtggtcgaaagaatcaggtcctctcgtcacactgtccacggcaccacgcccaccgatggttgtcagtggtcgcacagcaatccgagatcttctgataagaaagaaatcgttttgttgcaggccacgtgtacctatggccgagctcatggggagacaaaacaatgttggcttcacgtactacggaaagcgactcatccggatgcgaaccctgcttcactccgcccttaacctgactgaagttacctccacgtggattgaactcatcgactaccaggcggataatctctgtagagatttcattgtttctccggaacggttctacagccaggttgaagccaatatacagaaactcattggacgctttacttatggccacgagccaagtccagagtatctgcgaatggcggccgaggtttcgcgacacaccgggaaatccgtggaggcaggccgatgggccgtgaacagttttccagctcttatgtgggtacccgcatggatgcccggtgctggtttcaaaagatacgctatcgatgcaagaaatctgttcacgcgcctgctcaatgaatctgtcgcgctcgtaaagcagagaatggaccaaaatgaagcgggaacgtccttcgttaaacgatctctggaaaacatctcgctatatccatcatgtatcgatgagtcacttgttatatctgccgcaggcagcttgtttagtgcagggacagagaccttgtcaggtacaattctttcttttatcgtcctcatggcaaaccatgaagatcttcaagagcgtgcgtatgcggaaattctgtctgttgtcggcacagataggtttccgaattgtcgagatcgcccatcgctcatctttgtggatgcacttatccgagaagcataccggttcaatcctatcgtacccgtggttaaccgtagcaactacgaagaggaggagtacgaagggcatcttattcccaagaagacttggatcctcgtcaacctgtggtccattttacatgatcctaacgtctatccatcgccagagacattctttcccgaacgttttctcaactccgataaggacatcaatcccgatccccgctcttttgtttatggttttggacgaagaaggtgtcccgcagtggattttgcggatacaacactttttattaccataactcgccttctgacagtcttcaaaatctccccggagatggttgacgggaatgcatacccacccccgctggaagttagggaaggatttactccggctccaaaaccgttccgattgtcctag

SEQ ID NO: 111 - DNA, 720 bp, Stereum hirsutum
atgaccacctttgaacatgcacaacaccgtatcataaacacaccttctggatcaatcgtcagagagtcagccatcacagacccagtgaccgcagtaggaagcggttacgcggaaagcaagtgggtggccgaaaccttactgctcaaggctgcagacgtactcggtgctcgtgtgacgattgtacgagttggccaactttgtggagaccgagcccagggcggatggaacgagacagaatgggtccctgccatcgtgcgcagcgcacaggaactcggcgtgttgccatccagggacgagaaaatcacttggctcccggtagacgtagcttcatctgcgttgttggagatggccggttcaacggaggcgatcctacacctcgttcatccctcacccagcaagtggagtctcttctccgatacaacttcgtcgattttgggcataccttctgttccgtacagggactggattgctgccctgcggaagacctgggtcgaatcatcggactccgacaaagcgatgatcaacatcccggctctgcacctcgtcgactttttagcggagtacactgaagcggccaatctctctgtggaacgcgccacaattgtctcccgaagctcgagagatgcgaggagattagatgaagaggatgtgaagctgtggctcgcgtattggaagagtagagggttcttgaagtctgacgcttccgctcctgctgcgtga

SEQ ID NO: 112 - DNA, 1767 bp, Pestalotiopsis fici
atggagttgttgcgctcgcagcttggaggggacaattcgctctggaactttgcttcggccaccactacaggactcgcaggtgtcgttaaacttcggaacgggttggccgattatctgtttagcgagacccattgctacgagtccattcgaacacactcactatcggaacctcttgcgaattgcttcacagtatcgccgtcaggtatctttacaaaggtctaccatgaccccaatgtcgccaatggggcaagcaagtcgcaccaagggcatgttataccgggactctgggatggacacggccacctgctccaatatggagagttcctaaactcggtagacttgttcggatcagcttcattcgaagacatcattgttcgtgtcgacaactacctcgatgaacatccagacgcgggaaatgcggataattggttgagaggaaccggatgggaccaagcagcgtttggtcgcatgccaacggctgacgacctcagtgttgacgaacgtctcaagggcctgtatatcatgctggatcgcgtcgatgtgcattgtatatgggtttcgcagcctgtactggatctattgcccgatgaccttcctgatgtacccggtggagaaatcatccgaaagcccggcctaggtgtcttttgtgataatgcaatggacatgatcatggcactctggccaaagcccgacaataagaagaaacaaaagtttctccacagtgccatgtccaagctgaacgaggttggactcgttggcatggctgatgcaggagtttcccctagtaacgccgctctgttcaaagagcttgcgggcaccaaggactggactttgcgagtctatgccatgcttgaatgcgatgagcgcaataccttttgcccagagcacgcgaagaagcatagcagggaagacgggttcctcagcatacaaagcgtcaagctcttcgccgacggcgcacttgggtcttggggaagtgccatgattgaaccctattcggaccgccccggcacttcgggttctttgctcataaacgggaccgagttggcccgcataacaaagctttgggccgaagcaggttttcaagtgaatatccacgccataggagatttggcaaacagatacgcaatagatgccatgacgggagcccttgaaagtatttgtccggacgaaagtcttgcctcatgccaagctcaaaaacgcttccgcatcgagcactcccagatcatccacccagacgaccaggcacggattcatgctatcggcatcattccatcgattcaacctacacacgccacgtcggacatggcttacgccgagaagcgcctcggcaaggaacggacaggcagtggggcctaccggatgcgctcgctcctcgatatccctcccatccttggcagtgatttccctgttgagcctccagacccgttccagggcatctacgctgccatgacgcgccgaagtccgcacactggccgcggaaccgaggatcagccagacgggtggtatcctgaagagactctgagtctagatcaagccttgcgcggttttactgaggcgccagcgtatggcgcttttctcaagggcaaggctggcgtaatacaagaaggcgcctttgccgactgggtcgttctcgacatgcccctcgaggaaaccgacgtagaagacctgcgcgcctatcgtgtgcgtgagacttggatagctgggaagagggtctttcggcgagaggaggatgagtcagaagtgctgaatatcgccgatgaattgtaa

SEQ ID NO: 113 - DNA, 720 bp, Pestalotiopsis fici
atgaatcgacacttctttgggccttctaaagggttgcccctggactgcctcagcagacggcccgaggtgtacatgaggagcggcatgccctcctggactcaggattggacggccaagatcgtggacgacgagctttttctcagggtcatccacgtctcgtataggaaggatgaccagatgcctcgaaatacacgcccatggcgagaaagacaatacttttgcgcacataacagagcgcccaagatgcgccgtacctataaaggacccgcgttactcccatgggtcgaaatccgtcgtatagccgggggacccaacgggtccgaagacagttaccgtactgtctatttctcgtctcctggcgtcctgcattcttgtaccaaatgtttgacagacttttgcatttccgtcgagcagattacagagcgcaagccggcaaagaacgtcgtcactgccgccgatgcgagtacaacaacaacaacggcctcgagttctggggctgctcaagtaaaccacggtactggcgtctccaaaaagcccgagtttccaatgccaggcacctggcggattacagtcactgcctatcaccagatgggtagttgccgtacacccaacgacccaaagtggcaagccttggtacttactgagagagacaagtattatcgagaccaccaggcataccctcctggatgtgtaaggcgaaagtgggaacaggcgaattga

SEQ ID NO: 114 - DNA, 795 bp, Pestalotiopsis fici
atgagatttctctgtttgccaggcgcctatgccagtgccgaaacctttcaagttcaactcggtccctgcgtagccgaggtcgaggaggcaggcaatgccgagttcgtctggactcagggcacatactctgccacgccgccagacgggttcaaggatttctttggccgaggtccccactaccgcttcttcgactacgacggacatcaggcttttgatatactggagaagattcgcgatttccccgaaggcgccaacgcagaagaaacaatgagacagctcatgggggacggagcttcacatactgccaaaagtgtgcgcaatgcactgcaggtcttgattgacactattgatgcagacccgcaaattgaaggtatcctgggatattctgaaggagccaccaccgctgcaagtttaatcttggaggaacgtcgcagattacaagagactggcaggccgaggagaatcaagtgcgcagtcttcttcgcaggttggccgcccttgtctctccaagacggaaaagtgcaagtcttgctcgccgaccagagcgaaagcgtcattgacgttccgaccctgcatgtgataggatgcaacgacccgtacattctcggagccatggccttgtacaacatgtgtgacgaggattcggccgagatctttgaccacggaaagggccacacggttcctcgggatcggaggaccgttcatgagcttggcgacgcgtttcgccgcgtcgtgagcagggaatactcgtggcaaagcaatctgattgaggtcaaggggcttgacataaactag

SEQ ID NO: 115 - DNA, 6780 bp, Pestalotiopsis fici
atgacgtcctcaccgagcaacccagccactatcaatggccaggccagagagcagccacaactcatgcctatcgccatcattggcatgtcatgtcgcctctctggagatgtgtccaccctggatgatttttggcaaatggtgtcacgcatgcgctgtggctggtccgagatcccaccggagcgcttcagcaaagatgcgtatcatcacccaaacccagcaaagaaaggcgcctttaacacgactggaggatatttccttaatcaggaccccgcgctctttgacgcgccctttttcaacattacacaggctgaagccgagtccatggatccccagcagagacttctgctcgagtgtgcctacgaagccatcgagaatgcgggagtgccaaaggagcagatagtcggccaacgagtcggcgtctttgtcggaggcgctgcctctgactatcgacttggaacgctgcgcgacctcgagcaaacgccaatgtttgacgccacgggtaaccaccagtccgtcatgtcgggacgtatctcgcactactttgacctgcgcggtcccagtttcactgtcgatacggcgtgctcgtcatccttgtatgcgttgcatcaggccgtgcagagcattcgcagtggcgagtctgaacaagctattgtcgcagcttgtcacttgaatctgcaacctggagactgggtatcaatgtccttgtcacggctattctccgatgaaggcaagacttatgctttcgacaaccgtgccaagtcaggttttgctcggggcgaaggtgccggtgccctgatcttgaagccactcgatcaggccttgaaggataatgatgcgatccgatccgtgattgtcaatacgggagctaaccaagatggaaggactgttggcatcacctctccgtcgggcgcggcccaagagcagttgatgcgtgaggtatatgaccgggcaggtattaagcccgaagacgccggcttcgtcgaggcgcacggtacaggaaccaaggttggagaccccatcgaagccacggcaatccacaacgtgtttggtcaaggaaggacatcaagacagccgctttatcttggctcggtgaagagcaactttgggcatctggagaatgccagtggagtaatttctgtcatcaaggcggcgatgatgctgcaaaaggggtttattctgcccaacacaaattttgcttgcccgaatgagaatattcccctcgtgcagtggaacataaaggtcccagttgcgcaacgtccatggccatcaaataaaaagtacattagtgtcaacaactttggctttggaggctcgaatgcacactgtattcttgcagcacctccgattgttgaaaaaccccgacaggatgtcgacagtcaaaaggccgaagcacaacagcaccagcgtgtctttgttctttcatccagtgacgaggcttccgccaagaagaccatggagcagctcaccatattcttggagcaacatcccgaggtcttccaaaaggggctgatgcgtaacctggcgtacactctttgccaaaggcgttcgcatcccccatggaaagtcgctgtaacggcaaagtcggcatctgagctggccgaggcgctggcatcctcagacaccaagccggcccggacgtcacaggtccccaagatcgcctttgtttacactggccaaggcgcacagtggcatgccatgggccgtgagctgcttggacgctatcacatctttagcaatgtcatccaagaagcggatgattgcctgaagcgactcggtgcagacttttccttgcttgaagagctctcgagagacaaggaaacttcccttgtgggtcgagcgcacatcagtcagcctatttgctcagcagttcaactcggtctcacagaacttctcaagtcttggggggttacgccacttgccgtgactggacattccagcggagaaataggtgcagcctacgctgcgggtgccctatcattggattcggccatggccattgcatactttcgcggccaggcagtggtcaagatgaagcagacttatccagatctcaaaggctccatgatggcagtaggtgctgggcccgatgaactgcgaccactagtggagcaacttcgcagcggtgaagccgtggtggcctgcgagaactctccgagctcagtgaccatctcgggcgacgaggcagctattgatgagctggccatcgagatggagaagcggcaacttttcaacaggaagctcagggttgatgttgcctatcactcgccacacatgaagctcgtcgccgacgactataagcggttcattgaggacattgtaccacaaaccggcagtcctgtacagttctattcgtcgttgcacggccacaaaattgagctctcaaccctggacgcatcgtactgggtcgacaacctgacccgcccagtgcgcttctctacctctctcacggaactttgtctaaacagcgcgccagatgtgattgtagagattggaccacacgcagcattggagggaccagtcaagcagacactgaagcaacttggtcaacaagtcaagaagactacttatttgtctgccttggtcagaaacaagaatgccattactacagtattggagcttgcggctaaactgtactcaaagggtcaagccttgcaatttacacaaatcaatttggaagaggaggaaggagatcggccacaactcgtctcggacctcattccttatccctggtctcgccaacggtactggtccgagagtcgcctgtctttgcagcatcgccaaaagccttttcctcgtcatgatttactgggaagcatggctgacttttccaacgatttggcccccacatggcgaaacgtcctcaggacggacgacattccgtggctcaaagatcacaagatgcagtccctagtgacgttcccctttgccggctttgtctcgatggctgtcgaggctgctgctcagcgagcaaagttgcgtggcgtcgagttcgagaggtttagcctgcgcgagattcaggtcaagaagccattgctcatggaggacgagtctgcttacgaagtcgtcctgtccatgtccccatttcctgaaggcacgaggtcttattctgatgactgggacgagttccgcatctggtcttgggagcagggcaaaggatggatggaacactgtcgcggatcgatcgctgcgaacaagggcggtaaagcaaacttgatcagttcagctcataccggcatcgcgtctcgtagatttcaggtcgcagacgaagcgtgccatgaacacgtcgacgtctctgctttctatgacgaacttacagcacaaggtgccatctacggtcccacattccgcaagctcggatccatccgcgccggcagtggttactctgtcgccaagtttgacgtggcagatacaacggcgaccatgccactggaacatcagacgccctaccatgttcatcccacattgttggaccaggtctttcagctgtcctttccgatattgggcgccggtcgttgcggaatgaccactctatacatgccctcggcgatccaggagcttcacattacgacagatacacctgcggctgtcgggacggagatatacgcaattgcacaaggcgctccagacctcgaggcgcccagggctgtcgactttgtcgtcgacgctcttctccgcccggacgacgatcaagccataatcagcctcgtcggcttgcaaatgacgcccgtcaagagcgagagcgccatcagcgacaaggcttgcaaactttgcttcaagatgcaatgggatcccgtggatgagactgagggcgattcaagtccttcaacaagtcccacgtcattcgaaggtagcgagggcggctttgactctactggcaggtcgtctctcgtggcgagcatggatgagcagagtctaaacgtgactagtcaggttctcaaatcctgtcctcaaccactgctcgtctgcaacgattccaaagatactcttgagagaagcaaagatgatgccaacaaggccgagcaagcgattaactcgctatgggcgagcaagtctaccagaatcgtttcttgccaggccgagtgcaactttgctacccttttgagcgagaccttttgcagcaaaactggtcaagatgctctgatctgttcacttgataccttgactgacatggagaacacccatatcatcatgtgtgagcttgaaaaacccatactctcggacctcaaccaagagtcttttgcaagaatccaaaagcttctcgtgtcctgtgccggggtgctctggatcacaatgggcgcctatctgaacgcgaccaacccgactggaaacatggccgttgggctaacgagaacgatacggtcagagacggctgccaagatcgccacgcttgacttggacccagagtcggagctgcccatttatgctcaggccgagctcgttttggagacctttgacagggttttccatgacgataccgttgccgatatggaatatgccgaacaggacggacggctggtggtaccgcgcatcatggaagatgtcgagatgaacgactttgttcatcgtgaactgcacagctcctccccgtacctacagagctttacgcacgagacgcggcgtctgaaaatgaccatgggtactacgggagctcttgacacgctgtttttccaagacgaggaggtctactcgcttggcaaacacgaaattgaaatccgcgtcgaggccacgggcatgaactttaaagacgtggtcattgccatgggacaacttccaagcccatacattggcatcgagtgtgcaggtaccgtatccaggatcggcagcgcagtcgagcgtctggccgtaggagatagagtctgtgccatgtccgaaggggcgtacagcacgtttgcgcgatgcccggctaccagcgccgccaagattccggcagacatgtcctttgccgcggcatcttcgattcccgtggtctattgcactgcctattatggtctcgtcgagcttgggagactttgcccgggcgagcgcgttctcatccatgcggcggcgggcggtgttggacaggcggcaatgcagctggcccgaatgctgggcgccgagatttacgccaccgttggtagtccggagaagaagaagttcatcatggacaattatgggattccatccgaccacatcttctccagtcgcgatactgcttttggggcggccattcgtgaggccacaaggggcgctggcatcgacgtggtccttaactcgctggcaggggactttctgcgcgagacgtgggactgtattgcgcactttgggcggttcatcgagattggtaaacgagacatcacgtccaacactagattggagatgtccaagtttaaatacaacgccacttttagctctgtggacttgacagtcttggccaaggagcggccccagcaaatgggcgaaatcttcacaaaggtcatggatctctttgacagcggtgtggttcatccaatcttccccgtcaccgtgtttggtatctctgaagttgaaaaggcgttccgtctgctgcagagtggcaagacgactggaaagcttgtagttgtcccccgtcctggtgatcaagtcaaggcaacgcatctgaagaacagctctaccagcctcttccgaggcagtgctacttatgtgatcattggtggcactggtggattgggccgatccatgactaggtggatggttggaaagggagctagaaacattgtacttctttcccggaccggcgccgttcaaagccatgtggccagccttgtagaagagatggagcaattatctgcaaaaattgctgtcaaggcgtgcgatgtcgcatgtatggacagcgtaacggaggttgtcagctcttgtacccaggaattgcctcctgtcgccggtgtcatccatgcgggcatggtgctaagagatgttctcttcgaaaaaatgacctttgaggactatcaaaccgtcatacgctccaaagtcgctggcgcatggaatatgcacaacgctctagcagggaagtctcttgacttctttattgtcatttcttcagccgccggtattgtcggtaatcgcgggcaggcggcctacgccgcagcgaacacttttctcgatgcctttgtccggtaccgaacgcgcctcggtctggccgctacggcgctcgacctaacggccgtggaagacgtcgggtacctggccgacaatgcagaacgcaaggatgacgtgctgagaaaccttggaggtcagagtatgaatgaagccgaagtgctggcgcttgtcatggccgcagtccagggccgcatgcgtggttcgtgtggcaaccactgcatgaccggcctcgatctcggggaggacagcaccgcccaaagtctcccttactttgctgcagatgccaagtttgagcatcttcgccaggacttgccattcgcgcaggcatcagccgattctgcagctcaggtgcccattggcgttgccctctcccgcgctcaatcccacgaagacgccctccacattgtgggcgcaggacttgccagcaaacttgccactatcctcatggtgccggcagaggacttggatccagagacacccatcacaaaatatggtcttgacagtcttaatgccattgagcttagaaattggattaccaagtcactggaggctaacttgcaagtcttggaacttctaacaggtggatcgttgacgaatctatcatctattattattaagaaacgggtggctacaaaggatggggtcatcgggtctggtcacaaatag

SEQ ID NO: 116 - DNA, 1359 bp, Pestalotiopsis fici
atgccagcttttgtttctacaactcttcaagttgccattatcatgccttcgaatagtactatagacttacaacatcgtaaagcatgccagcagtgcaccaaggcgaaacggaaatgtgataaacagattcctacgtgtcgccggtgcatccgaaaaagggcccattgccaatacccaacaacgcggcggtacgagcgtaaagtcaaatcgcctcggcagcttcgaggcgcaagtaacgataccgccggtccacaattgccagtgcccataggcgagggtgcaacagttgagcgttgccaagctgaaccagcagtcgttggctccttcactgggtgcgacgactcagacatggcccaccactccttggagctgttgtcgccgattcctgtgctgccagtcgcaaacccggcacctatgagcaacctcgatgttcggtcctggttttgtggcccagatgcatggtcgatgaatcaccatattcccgccaccagctccaacctaagcttgccttcttccgctgtcaatgccttggccttgaaacaatgggtcgagtcaattcgtggttcactccgatattggattgaattcggccataacatattcattcacaaacatttgtacttgcacatcggactaccgtcatcacttcaagatgcgtggatggcattgacagcataccattccaagacgaaagaaaacgaggagataactctcacaatggtgggggatcgagcgcaaaactatattctacaacagtccctgatggataatataacgagcacggcatctactggcgatgtttggagtcatcttgttcgcgttcaaactcttttcatttatcaattcatccgtttatttgatggagatatacgccaacgagcattagccgagaaacaaattccgaccttggatgcatggtctgagcagctttggcaacaagcccagtttgatgcagagctgatgacggcccaaagcatcattggcagcggttctattcaagatgatggccatgacgacagcgaggaaattgcttggaatgaatggatactaagcgagagtgtccggcgcattcggctactcgtcaactttatgcatggtgtctacttgacactgcgggacggatgggtggaatgcaatggagctccaaagttcacggcaagaaaggggctctgggatgcagtctcgtcggctgactggacggtgctgctgcgaaataaggggccattatttgtatccttgaatcaaattgatcagctcacaatcatggcaaaggcggatgaagtagagacattctcatttgatttactgtcggcttccgtaaatcatggcaaacttgatacttggatcaggactttataa

SEQ ID NO: 117 - DNA, 768 bp, Pestalotiopsis fici
atgtcttctcaaaagatctatctggtaacaggcgccaacagaggcattggaaaaggccttgttgcagcctatatatccgagccagagactgttgtgattgcggcagtgcgtgatccgaatcacaagacttctcagtcactcgtcctactgccaaaggcgacaggcagcagtctgatcattgtaaagatggacatgcaatcaagcgcatccatttctgaagcaattgataccctcaagacacgccatggtatcaaaaacattgatgtggtggtttccaacgcaggcatcggcgaagtcactggtcgacttgttgagacgcctgtgtcagtgatccaaaggttcatcgatgttaatacttttggtcctctgaatctattcaagacttgcctgcccatgcttctggaatctcaatcacccaagttctgcatcatatctagccttgcaggatctaataattcactcaacacaatgctacctacagcaccgtacaacgcatccaagctcatggtcactcattttgctcggtggtttgccgtggaagttccagaggtgaccacttggtcggtgcatcctggattggttgacacggacatgggaatcacgggtgtggatgccataacaaagatgcagccagagatcggtgcttccttgaagtgcatatccactgaagaaagtgtagcaggtttgaaaacagtgattgaaggtgccacgaaggaaaatactagcggtcatttcctgaattacgatggtgcagagttgccatggtga

SEQ ID NO: 118 - DNA, 729 bp, Pestalotiopsis fici
atgccagatcagcagaaatatctgaacaaactgaatggggatcacgtcctcatcattggtggctcctcaggaattgggcatgcgatagccgaagcttgccttaaacatggctgcattgtcactatttcggcatcctcggcattgagcgccaagaatgcccacaaacgccttaaagaatcgtatccgtctgcggcaaacagaatcacctcccttgcgtgcaatcttggcagcacttccgacattgaagcgaatattgccaagctattccagcatgtgtccaagtcggggcttcttgaccacatcattttcaccgcaggcgaccagcttgctcagatgcccatccacgacgttactttgtcccgtattcaacatgctggttttggtgagtcttccattactcttacaagtggcgtcggatcgtacaagatgggcccggagggcgctgtggcaggagcatacgccgcgggtcttcacggaatggccagagcgttggctgttgacttgcaaccagtcagagtaaacgtcgtggctccaggtcccacggatacgccgctttggaggatgccagagcagcagaaaacggcacttatcgagatgcttaggacgaaacttgcaactggggagattggaagcaccgaaaatgttgcagaaacgtatttgggggttctcaaggactggaactgcactggtgctgtattaaacacgaacggaggatacttgttgttgtaa

SEQ ID NO: 119 - DNA, 1284 bp, Bipolaris oryzae
atggctcaaaacgttgcagcaaagcaggccgagaaggtccttggacacgatcaacagaaaaccgtgacgcaaacagatatctccaaccctgaccgcgatggaaagaagtatgcggacccgtctggcgagaagatgaaggcgttggtgtggatggggaagaacgacgtgcgtgttcaggacgtcagcaagcccaagctcctcgaggaccacgatgtactcgtcagagtcgctggctctactgtctgcggaagcgacgtgcatctcctgcacggcgtcattatccagacggaaaagggagatatcctcggccacgaattctgtggcgtcgtcgagcaagtcggatctaaagttactgagcgaaaagtcggagatcgcgttgtgaacagtttcgttgtctcgtgcggtgagtgtaggttttgcaagcagaaccttacgactgcttgtgataagacgaatgcgtctaccgtccatcagatgctgtatggcgagaagttggggggtatctttgggtattcgcattttgtaggcggatatgccggtgggcaggcggagtatgtgagggtaccgttgggcgaccagaatcttttgaagttgccggacagtattccttttgagaagggtctgtacctatctgacgtacttccgacttcctatcacagcgtgtctgacacgggtgtctatgaaggcgacagcgttgccatctggggtcttggacctatcggattcatggcatgcgtatgggcgttcaagaagggcgcaaagcgtgtcattggtatcgacaacaattggcgcactgagtttgcaaagaagaagattcctggcttggagactatcaactatgaagagctcaagaaccagtctattcccgccaagattcatgagatggtccccggaggcgtcgacgtttgcatcgaggctagcggcggagagtatatggtcaacgagtgcatttactcgaccaggaagtttggacgagttggtatcattgcagattacgttggatttacgaaccacttcaacattggtgcggttatggaacgtggtatccgactaatcgggtgcggacagagtcctgttcagaaatattggaaggaaatcctcgaaatgctggaaaagggtgaggttgatccgacaatcatggtgacccatcgcttcaagattgaggatattgcaaaggcctactatatgcaggagaagcgccagggtggcttactcaaatgttttgttgaaacgaagttctcggagccgcgggctgctggcaccccagagttgaaggaactctaa

SEQ ID NO: 120 - DNA, 1620 bp, Bipolaris oryzae
atgttctctctccgtattcgtcgtcccttgctatcgtcgctccgaacactcggggcttccccgctatcttcccgatcattctcaatcacagcttccatgtcttctaacgaccgagcaactctccaagacggagagaaggtgactctaggacaaggaagtaaagagactgccacatacgaagacctcaaagcctccgacgaggcgcatcaaatgcatggttttggtcatcccctcatgcaaaagggaccaagacagctcatcgtcttcgaatcgggcgacggggccgttctgaaagatgtcacgggaaaagagtatctggatgccttgggaggcattaccgtcgcccatcttggccacggtcgcaaggatctcgcgcaagttgctttcgagcagatgaccaagctggaagtctcttccaaccagcgtaacctgaccaacaacaatgcagttaaactctgcgagcgcctctctggcctcgcggctcaagctttcccagagaaaatgactggctcacgcgtgtacctcactaccggtggcggtgagggtattgaagctgcgtaccatcttgctttgcgctactggaataagtccgggcctctaggtactagctatggcggaggctacaagaaacagaaactgatttctttccgcaattgctaccatggcagcacgtttatccctgcgtctttgaagcccgagttttcagactatgggtggaagaggtggatggagggtcatggccgtgatgtgtatgagagcagcccgcataggatgttttgtaatatcgatccgccacatgagttgttctttgaaaggagcaagttgaagcatggagagaatgttgggcaggcggctgcacgggagctggaagaacggattctaaaagaaggcgccgataccgttgccgccttcgtttttgagcctgttcaaggcgacggtggcgctgtcgacatgcaccgcgacttcttcccactcgcggagcgaatttgcagaaagtatggaattttgatgattgcagatgagatcatgtcgtttgccaagacggggcactggttcggcatggagttgtacggcgtctgcccagatatcatggtcatcagtaagggtctgacatgtggttatctccctgccggagccgtgatttatcgtgacgacatctggaaaacagcattcaacaacatcagcactaagatgatgctgtcagatgtctggcagcatgactacacctggtccggacatccagtctgctctgccgttgctctccgcgcactcgacatcatcgaccaagagaacttgattgaactgtctgcgaagcgcggcagagagtttctcgatattctcaagtcggagctcgagggattgcatacggttcagcaagtccgtggaactggtgtcatgcttgggatcgatctcatttctgacatcgcaacggatattgagcaaaaggtgcttctagaatacggtattgtgctaagggcgagtaccaacaagcattgcttgcttctgacaccgctgtactctatgacggatgagcaatttaagaaagttgcagagtcgctgaggaaggttttgagaagttttgctacgctagaagtgaaccctggtctgtcactgggctga

SEQ ID NO: 121 - DNA, 1173 bp, Bipolaris oryzae
atgatgcttttcaaatggatatgtccagtggcgttgttagcagttcccgcatcttcctccatagtcgaacgagctacggtagatacgctacccctcctgactgcaatatccaaagatccagaactttctattttctatagtcttttcaatagtacaggaggcactagcggaattcccggtccaccgttcgaagagcgcttcaatgtcctcgcggatggacggaagtacacagcgtttgcacccgtcaactctgcatttgaggcgctgcaaccgggactagcagcagctttgaccgcaccggcatcctatgtgctcctcgaagccatcctgagaactcatattgctgaaggattagtgacgacaaaagaagtccgcagctcggaaaagcccgtgataagcatcgaaggcatacctctcaagtttgcgtccgagggtaacaccgttaccatcaacaaccaagccaaattagtttctgcacaaggtactgctgttggaaacggagcaatcttcaaaatcacctcaataatcgaccccttggtatcgatttttggaactgatgtgaccaaaaacggatctgacatcgcatccgcaagacgtcggcaagccaagaaaatcttagagtacgagttgcgaccctcgggaaccatcgcatcggccctatcttctctgccagatatctcgacatatgtagatctcttgaacgcaacatccccagccttcttcagccttcttaactcatctctgcccgctggcaagtacatttccatattcgctccgagtaacgcggctcttgaagctgtggggcaaggtgccaaggctattcagcctagcaaccagccatttacttcgtacttgcttgagtatccgttcatagatacgacgttggttggtagtgaaaagtcaattgttgggttcccggcggttgtgaggagagatggcaatggggctgttacgagtgtgaataatgcggctgtaaagggagagccgaagtgcgtgggaaatgctctccattcagtagctgcgatggtcacaaatgatgccactttcagtgtgcgggtcaggaatctggcccaaccgcgaaacgactgcttgtatctgggtcacgacgtggcggaggtggctgtgcctggtctgccttccgcggaagccttagctacatgtgccgcaccgtga

SEQ ID NO: 122 - DNA, 2328 bp, Bipolaris oryzae
atggcatcactgtctgttagtcaagtctctgcgttgattgctgcaggcaccactgcacgtaagtcaacctcggtgtatacagctgcttgcaagtcattaacgacctggaaagtgcaactactcttaccactggcaattccgctcatcctcatcgctttcatcaacaagcggcacgatcaagtacagcagactgctgtcacatggtccgcgctcagtcgaaccctccactcaacatactggccgacgattctcaactcggactcgtcagcgagtgcgaatgtgaaccctgcggttgtcgccgcagtctacttgggcatcttcacaacggttttagtcgctgtgaccgccgtcatcacgccccttggtctttatgatgcaatggtgtctagcaaacctcaaaggctgcctttcagctatgcgtcagacctgtcacccttcgggtatggaagtcttcctagaaatgatatgggattcagtcgtatctgtggaagccctcaaggatcaatgagttgtcctcgctcaaacttctctgtcacccgagacggctccattgacaataatggcacactcacctggaactggacagatggctactactacaccaacatctctttggagacacagaacctatgggaaagtggcctagtaacaatgcaaaagagtgtgtctagtattttcgacatccagtggcgttcctatgaaatcagacagcagaatttatcaagtatgttcgcttactacaatgatacatcttcatctaccgagaagtactacgacaacggatctccatacttagtgggaggttaccgaacgatacaaggcttgcttccaagcaatggattcaggatcgtcgaagggctggtggtcgatttggaaagaggtggaattggttttcgtaatcacaccattccctctcagccttctcatgaagttatatggacagaagatattctgttcgttgtgcccgaaacaagttgcgttgataacaatctaacgattgattacgatcttaaagaagacgatacaagccatacattgggatctggtggcatcctacggctgacagatcgtggcggattcgcgaatctgaacagtacggtcaatctggaaggcattcaaaccatgaacagctcacaagaccgcatctatcttcatgctagagcactgtatgcagccgggtttagcaacgcattgaccatgatctatatgaatttgacgaacgaacagcacggcctgggagaattcaggatgtacgaacaagcaccagtcgggatatcatacattcttgaagatgagtcgaaaacatctacatacagcggagatggtgggaaagtagccaattccatcccgaaaccagggagaattgctcttcataggcttggtcaacatttagatctcccttcttcagccaacatcgccagcaaccacacgttccttatcaatcacaatcagatatacacgaaccctcataacgtcacaactgatcttttcaaatacttcgggttgctagacctgcatgtcatcaatgtgacggaaaagagctatcctaacacatcatccatgccgatttggggagtggaaaactctggcatgacttatgggaatataacaccattttgggttgtagaactcacgatgaacataccgggagcaagcttttatagcaccatcatgcggtatatctacggagacctgttaggaggctcatcaatttcacccgcggagactcatgactactcagggtatggtcaatttgctctatatcaacggtggcttgaacttgggcggacagcaacactatctgcagacattatcaacctgatatggacagacattgctgcaaacgctgtagttggtactcgatcctggttatccaagtcgccgggttcagacacatctggatctcgagaccagagcagtccgcgtgaggtgcccaacgtcactctgctgcaacgaaagacgaagtaccatatcgcctacgcggtaccagcaatgttgttactgttgctggcactcgtcataagtgtcgctacagccatactactgcttctacagcgcactgggttgaatcgcatgagatggttcctcaaccaaacctcactgggacgcaattttacagcgcttttatacccagaagtcagctcacagcagtcttcgcagaaaatatgggcgaagaatgatgcacatagagtaataactgtggatctggataaaccgtacgctgacaaccaggcagacagtcaaacgagctcccagtccaaaggagacgtggcggtctcgcagcgtttgatgagtgagaatggaactgagcatccggaacaacagtag

SEQ ID NO: 123 - DNA, 855 bp, Bipolaris oryzae
atgaagattctttgccttcacggacgaggctctaacaatgagatcttccgcatgcaaacggctcccatccgtgcagcactagaagattttgagtgggtcttcgtccaaggcaccgtccgccacaccgaaggaaactggtctctacacacgtccgacttttctaagctccctctatacacatactacaacccgttcgacccccaatctatcatacaaactcatgaagagctcctcgacatcatacggagccatggtcccttcgatggtgtttttgcctactctggcggagcagcactagcagctgagctcctcatcgaagctgctcgttctgaatcagctgttgagcctctatttcgctttgccgtcttcgtgaacggcgcatcgccactacgcgtctttaaagtcgatgatgtagacacggtgagcggtcacgttgacgtctcgcaaacattccaacaggcaaaagaaatgtttctccgacctagcgcgctgcgacataagcctggtgtcagcgaagaggatcaggtggatcataagaagttgctaggactcttgagcagattagaagggaaaatgatggcggatggtactgcctttttgagcgacggtacatatgggctatgtcggtgggagcaaaacaagttgcaacctgcattgattgaaattccgactcttcatgtgaggagcacggcggaagatcacacggatccgcatcatggaaaacatctggtggagctgtgtgatcagtttgatgtcgaggagattcatcacgaatttggacatgattttcctaggggaagacagttgatgaagcagatagcggatgcgatcagagacatggctgagttggcgtga

SEQ ID NO: 124 - DNA, 1752 bp, Bipolaris oryzae
atggcacaagattcacgaccttggtggcaaactgctatcggttaccaaatatggccggcatctttcaaagattcgaatagtgacggcataggcgacctcaatggagttctcagcaaactcgactatctcaaatcgttggaagtcgatctcatctggttttctcccgtttatgattcgcccaacagagatatgggatatgatgtctccgactacgaatccattcacccacagtatggcaccattgccgacatggaaaacctcatcaaagaggccaagaaacgtgacatcaaaatcgtcatggatatggtcacaaatcattcatccgacaaacaccactggttcatagagagttgtaaatctcggtcagggccatacagcgatttttacatctggcgagatccaaaatatgatagcgaaggcaatcgacaaccgccaaataattggcgcacagggtcgcggtatggaaagagtacatggaagtacgttgaagcaagagatcagtactatttctgctttggaactacttatcagccaaacttgaattggttctgcgacgacttgagacgcgcagtatatgacagcgcggtgaaattttggttggagaagggcgtggatgggttccggatggatctggttgggctatactggaaagatccgacatatcctgatgcaaaggaagtttatcctggagaagcgctgcaaccactcgacggatcgcggtgcttgaacggcgaaaaggttcatgtctggctaaaagagctgaaggaaagaatcgtacaggactttggagaggacatcgtgttgattggggaacttccctccacggaccgagagacattcctacgatacatatctcctgaatcaaaagaactagagatggctctcgatacagatatcttcattgtgggtaatgaatggacagatggtttgtacgagctcaaaaagccagagctaccactattcaaagatgccgtcctgaagacgcagagccttctcgacgatggaggctggcctactgcattcctcgagaaccacgatttcgctcgcagtgtatcccgttttgggccaggtgagggggtctatcgcgaagctgccgcaaggatgcttgctctcatggctgcgaccctttccggaacctttttcatctaccagggtcaggagattggaatgaccaacgtcccatcacattgggggcgagatgacttcaaagacaacgccgacctcgaacatatcgaagatattgatccaaccaaagacgctgaggcggtggagaagtcaattgatgcgcttactacctgggggcgagataacggaagaacgccagtccagtggtcagacaaagagcatgctggatttagtgacgtgaaaccctggatcaaggtcatcgacaactacactcacataaatgtcgaggagcagcttggaaacccgaacagcatacgttctttctgggtgaagatgatgcagatgaggaaagagatgtttgatgtgttagcttgcgggctttttcgtcttgttgacagggacaaccccggtgtgttctcgtatacgaaaacaaccactgatgaaaagaccgagatgctagtggtattgaacttctcgagcgaggaagctcgggctccgacgcaaatcgggaaagatctaatgcatctcgtttgcacgacagctgcggcatcgacggagactggcttggatgaagtcacattgcagccatgggagggtcgcttgtatcgattggcaccgaagttgtag

SEQ ID NO: 125 - DNA, 1122 bp, Bipolaris oryzae
atgcaattcactgcggcaatattttgcatacttctcgccgtcttaggcttcaaatctttacacctcttcgcgacatccaatggattgttagggcacctggagcgcataatcacgaacaagtctaccccggcgggaaaacctctacgtaattggaccactggcggccgtttcccacggatcgatcttcaactcaatgcggttgctacgttccttctactctcctgtgaagattactcagagccagatgtgaatcttgtaggcttttggtttgatctatcatggggtccttcgtgggttctgattgtattggagagcttcagggagtacagtcgaagccgactgatgtcttggattgcaatcccagggctcttcatattcaatcagtcacacgctgtgtttacttccctttatctggcaatcagattgcttgttgcagttccggcgaccactgaagaaagcctgatggttgataacatccatctccatgcgattccctggagtttcttattaggatatcttctgccaatatctctcatggcgctgcctggaatatccatttataatcttaacacacagcacatgctcacctcattttatcagcagtggcatctttacatcagtctggtccatgttctactggtgacattgtggacctatacaggatcgatgggcagactggaagacgaaaactccaaggcctcattgtccgcggtcaggccggtttacgctttagccttctctatggcggtcatctcagtttgggttcccatccttgtctccttcgtcatccgtgcactacatcgaatccgcaaagcacatccatctagccaaaagaatcttcacatttccagtatattcatcccaccctctccatggagtaatatgaaatgtaaaaatgcatttgagggaggaaaatggcttctccaatgggacggcatagtaggaggactcagtaccgcagtttgggcaatcgctttatatgctgaagctcgcagtgcggtcgagccacaggagggattagggtcattttgcacgaggcttatatggtatatggtcttaggcgggccaattggtgttgcgacaggagctttgtgggaaagagacacgctcttgctgcagtga

SEQ ID NO: 126 - DNA, 1578 bp, Bipolaris oryzae
atggtcctcaaaacccagtggcaatacccaaaggatctgcttggattgctttctctcatcataggactgatcgtggcaacgatcctttttacctattccatctcctacatttacagcttccaaagatccgggcacgaaggatctgagccgcctttactgccctattggatcccgtactttcaacatctgcctgcattccttctagacccggcaagcctctatgaacgtggtagagagtacttctcagggaaacccttcactctcttactagccgggaccaagttttatgtcttttactcccccgaatctgtcagccatgtcttcagtcggtctcgattgttcactttcgagcccgtcatggcaagcatgatggaaaatgctgttgatcttccacctccagatcgacccaaattcgtttcatcgacagcggaaggaaaagatagcaaattcctggccgaaaaccacaacatttggacacgcaatctttcggggaaacgcctccatgacatcatggaaatctatatgtcggtgctccctactgttttggagtcgaacatcgatctttcgagtgacaagtggcaaaaaaagagcttgtacccatttcttaggaaaatcatcttcgagaccagtgtacagactttttttggtcctcgtttgatacacttctggcccactatgtgggacgactggagaagattcgatgatgctacgtacattggtgtacgatcgaacttaatattcaacttacagcccaagacccataaagcacgcgaaaggatgttccgagcatttgagcgctggctagatgctgctggaaatgatgagtggaaagacacggataacgtgtggtgtgagaaatggggtctccgtatgaattgggagagggatgtacttggcaggcaatgtggctttacgaaaagaggaagggcatgcttgcaggcaagctttctttttgtaatcgtaaccaacgctgccccaatggctacttggtttgcatactgtgctgcatgcaacccgtctcgtctagccgagtaccgtgacgccgccacacctttcatgctttctccctcgaccctctcaggctcagcttcaacgcctcactttgatcttccagctctcatcaaaaacccgtttgttcagtccctctggctggaagcattgcgcctaggaactatatctgcagccgcacgagttgtaacccgggaaaccaccctggaaggttatcttcttcgagcagggtcggtcatcttgatgccagtgcatttaatgcattctggtgtagaattcccagaggcaaagaaattccaaccagatcgatggctagacgtagacgaagagaaattgaaacgtcagaatatggtgatgcgcccttttggagggggcacaagtttatgttcaggcagatatgtggcggagatggagattgttggcgttgcgagtgtgctgctggagatgctcgacctgaaatttgaagaaatactttcagagaatcagtgggagttcaatcccagaagtatcggtgtcatggcgccaaagaaggacgttctagtctggataaggcgaagagagaagatgtag

SEQ ID NO: 127 - DNA, 7965 bp, Bipolaris oryzae
atgccggtgtcatttgttgagcctgcttcagcagcagaacctttagccattgttggtcttgcaacccgcttcccgcaagaagcctataacacagaaaaactatggcagtttttactggcgaagagatgtgcccatacaccaattcccgaagaccggatgggcccaggacattaccatcctgatcctgaacatggcggtacacatgctgtcgcagctgaccaaagtattttgcatttcccaggcggtcactttcttgccgaagatccagcatacttcgactcttcattctttggaatcacaaaaggcgaagccatgtcacttgaccctcaacaacgcgtggtactggagaatgtgtaccttgctcttgaaaacagcggtttcacattggagcaagtcgcaggatccaatacttcagtttacgtctctggcttcaaccacgaccacctagccatcctgaacagcgatccagagacaacgctgagacatcgcgtcactggccttaccaactcgatgcacagcaatcgtgtctcgtggttcttcgacctaaaaggaccaagtgtaactatcgatacagcgtgctcgagctccatggctgctttacatcttggtagccagagtctacgaacaggggagagcgatatgtctatcattactggagtaacaatcctcaattatcctggcgacgttaacggcatgtcgcatcaaggcttcctcagtcccgatggtcggtgttttagtttcgatcaccgcgctaacggctttgctcgtggagaaggagcaggcacagtaattgtaaagcgtcttagcgatgcccttcgtaacggtgatactatccgtgcagtcgttcgtggtacaggtatcaaccaagacggccgtactccaggcctgactcttccaagtagcgatgcacaggaaagattgataagaaccacatacgcatctgccggactaaactttgacgataccacattagtagaagcacatggtactggcacgaaacaaggagacgcgattgaagcccgcggaattgcacaggcattcaagtcgagacgaaaagataaaccgctttatctaggttcagtaaaagcgagtgtaggccacttggaaggtgccgctggtgttgcaggaatcatcaaaagtgtactggcactagaaaatggtgtcattccgccacaagccaattttgaaaaggcaaaccccaagattcccttcgagaaatggaatctttctattgccgataaggctgttccatggcctacgtcaggtctccgccgagtgtcaattaattctttcggcgtaggaggaacgaatgcacatgctatcctggatgatgcttaccactatctgaaagatcgtgagttgactggaaatcaccgcacagccattacagcaccttccatagagaagattgattctctgagccgggctgcggaagctcttatagccccttctgagcagctcagcgaaaccccacacttgaatggagacgagagtgctccacaacagaatgggacccacacaccatcgaaaaccaacggccatgctcacgctggtaatggtgttgacaaagcccataatctgagaagttgggtgtcggctgaacatattccaaagcctcctcaactcattggactctccgcctttgatgaagcaggcgtgtcacggaatgccgaaacacagctcgccttcttcaagtcccgttctacataccctccatccttcttaaacgactattctaatactttgaatcggcgttctcagttcagctggcgcagttttcttcttgctggagatgcttctgatatggttgaggcccttccaaacgttcatacaaaagctatccgagcccgcggacccatatctatcgcctacgtcttcacgggtcaaggagctcaatatgcagagatgagccgagaactcttcgtgtatcccgtattccgtgagagcataacacaagcaagtcagttctttacatctttgggcgcaacctggtctcttctcgacgaactgtcccacacaaaagaacaaagcaatgtcaatgagccttggttatcacagcccgcgtgtacagccgtccaggtggcattagtagatctgctaaggtcatgggacgtgaagccatcaagagctgtaggacacagttccggagagatagctgcagcctacgtttccggaaagctgactcgtgagtctgcatggcgtgtggcatactaccgaggagtagtatctgcgaaacaaagcgaacaaaagggcacgatgctggctgtcggtttgtccgaacatgatgcccggccatatgtggacgctttggctaagcaaggggttctggtggtcgcctgcagcaacagtccgagaaactgcactatctccggggatgagcatctggtctcaaaactgcacgacttgctacaagagaaggaaatctttgtgagaaagttgactatccaaaaagcgtaccactcgccgcacatggaccatgttgcgaaagagtatgccgcacttctggacggtatttcaccggatacatccatctcaccgaataccgtggaaatggtctcaacagtgaccggagctttcgttaccgaagaacttctagatgcagaacactgggtcaaaaacttggtttccccagttcgattttcggatggtttgacagcgacatgtttccgatccgcacaaaaaggccaggtttcactccgagttgatgctcagggaggcaaccattttgcggatgttgtgctggaactcggtcctcacggcgctctccaaagcgctatcaaagatatcctcgctactcagcccagcgggtcaagtataacctcgttccccgttttgaatcgatctaaacccgggcctgagacgctgttaactgcactgggacacatctggtctcgcggatatccaatcagccttcaaaaagttaacgaatgcactcagtctgagccaaatgccctactaactgacatacctggctacacgttcaaccactctcaactcctctggtacgaaagccgtctgagtcgcaactaccggctccgcaaagcgcctcgccatgacctcttcggcgcaccagtaccagattggaacaaagagcgccctcagtggagaaacgtacttcgactgaacgaacagccctggctgcgtgatcacattgttacaaactcccatgtctatccgggtgtgggttacctcatcatggctatcgaagcaatccagcagatcgctgatgaaggtctcgaaatcacttccttccgcctaagagacatatctatcaaacgtgcaatgattgttccggatagtaaagacgggctggaagtaatgctctcaatgaaccgggtggacgaatccagcataacagtctcaaacacatggcgccgattccaaatctcgtcttacaatcctgctggcgatgactggatcgagcattgtacaggatacattgctgtggaatatgctacaatcactggtccagttgacgatgggctagaagctcgagaggagtcagccagaagacgccgagaattacaagatgccgagcacaaatgtcaggcatcgtttgacatgttccgtgcgtacgagaatatggccacagtaggacttcaatttggcccattgttccgcaatgggtcagacgctaggggcactggtgatcaaggcggagcagtcattgggcgagtgacagtgccggatatcgcagcgtcaatgcccaggcagcacgcatcgccacatctgatacatcctgctacgtttgacagcatgatacacttcgcccttgccgctatcatggatctcttcggtgccacaagtctggagaacccggcagttccaacattcatcaaggatgtctggctatcagcagacctgaacccgctgcctggccacaagtacaaagtacatggtcgaactgagcgagttgctttcgagaagtatgacaacgacgtacttgtgtgggacgaggaaactggagatgcaagaatctcagtcaccggtattcgcgccacaccactcgactctgccgatcagcgagcagcaactagcagagaattgtgccacgaggtcaagtggcccgtttatctcgagacaatctctcaagcagacttggttccagaggaacgccccgtgggatccgacagtctgacagccgaatgggtacaccggttgcaactagccactctctgcctcgtccacgacgcactggacgagtatcgaaaagcccccaaggctctccaaggtcatcttcaaaattacttcaactggctagagcaactcgaacactggacgaaagaagacaaaatctcatcagtcccacgctccgacttcgaagccattcgtcacaacgacgccgccaaaaccaacatctatacccaaattcaagcctacaaagccgaaggccgtctagcctaccgcatgggttcaaacatagtttccgttctccgcggcgaaaccgatcccctccaactcatgttcggtcaggacgacatcctcgaccaagtctacgccgacctcgtgcgccttggcgatctccctgagctcctatccaaatacctgcacatcctcggtgaaaaccggaccaacctacgcgttctcgaagtcggcgctggaaccggatcgtccaccgaagctgtgatcaggaaccttgccccggtatctgaagacggccagctgttgcaatctagcgtgctgcaatacacctatacggatatctcgtctgccttcttcgataaggcgcgcgagaaattcaaggcgtggaattccatctttgagtacaaggtgctacatgctgagaaggatgttgagagccagggatttcaggccggaacttacgacgttgtcgttgcgcagaatgttattcatgcgactgaggatttgcattctacgctgtcaaatttgaggaagttgcttaagcctggtggacgaattttgatccaagagggtatgaggcaggactacttctggtcagcactggcgtttgggcagctgagtggttggtggctctcgaaagaggaaacgaggaagtggagtccgttcgcgtcaaaggaccagtgggcaacgatcttgagtggagctggctttgatggggttgagttggagttgaaagatgcccagattgatgtgtcgcatacgcagagtattcttgtgtcacgtgctgttgagcagaatgcggcgttggaagtgcaaaagggcagagctgttatcattgtacccgaatcattggacaaggatttgatctcagggctgcagcaggaattggagaaaacacttcagagtggaagcatctccatcgcctcaatccgcgagctgaaagaccaagatttgagccagactctatgcgtctcactcctggaactgaacagccctgttctctccaccctgacttcagaagagtacgaaggcgtccgaaaggtacttacagaatgccacgccgttctctgggtcacaggtgacatgctagaaacccccgaaaacagcatggccctcggtcttatccgcaccatacgatgggaacgagacctcgacgacgcaaacctcgtcaccctatccatcacaaaccccaagcccaacacacccaaccttatcgaatgtataagcaagctcactaccctccaattcactaaccctctccccaaagaagaaaagcagggcgaatacatcttcaaagccggatccttcttcaccagccgcctccactcaagcaccacgggaaaccgcttccttgcctcccaattcagcactccccagcccgttcccacagcctggaaagacgctggaagaccagtcaaactatcctctgcctcacccggacagctagatcgcctccaatgggttaccgaccccgtctacaccacacccctagaccccacacacgtcgagatcgaaatcaaagccatgggcctcaacttccgcgatctgatgatcgcaatgggtgagcatatggcttacagcatcgggtgtgaagccgctggtgtcatttctcgtgtcggttcgcaagtcactgacgtcgcggttggagatcgcgtcacgtacatcactggattggatcatgtcggttgtttccacacatttgggcgggtggaccagtcggtcgtgacaaagattcctgattcgctaagcttcagtgatgcggctggactaccggctgtgtatgttactgtgttgtatgcactgagagatgtggcgaggttggcaaagggggagaaggtgctgattcatgctgcggcgggaggtgtaggacaggcgtcgattaactatgcgaagagtgttggggcagagatctttgctacttgttcgacgcctgagaagagagatgtgctcgtgcaaaactacggtatcccggaagatcacattttctcgagtcgagacttgagtttcgcaaagggcatcctgcgagtgactggcgggtatggagtcgatgtggttctcaattcacttgctggagatgctttgagatgctcctgggaacttctcgcacccttcggtcgcttcattgagatcggaaagaaggacattcaagccaattccaggatcgagcttagacctcttctgcgaggcacttccatgacttgcgtcgacttggttacaatgatgaagtgtcggccacaactagtcaagcagctcactgacgacacagttcgcctttggagcgagggcgttgtcaaaaccgcaaaaccaacaaccgtttccccactttcgaagctggttgaaggctttcagactctacagtctggtcgtggaactggtaagatggtgttcgtcccacacgatgacgatattgtcccgatcgtgccggagcagcaaaccccattctacttcaagccagacgcaacatacgtcctgagcggtggactgggaggattgggacgaagtattgcaagatggatggtgaacaggggtgctcgcaacctattgttcctatcgcgcagtggcaagatcactccagccgttgccgagatggaaaagcagctggtcgagcaaaaatgtcaggtccgcattgaaaaatgcgacgtcactgattcagccgatcttgagagggtcctgaaggaatgcgagtcatctttgccacccatcaagggcgtcattcagggagctatgcaactctcagactccatcttcgaaaacatgacctacgaaaactacatgtccgccataaaccccaaagtactcggctcctggaacctccacgagcacctccccaaagacctcgaccacttcgtcctcctctcctccgcaaccggtatcctcgggaaccgaggccaggccaactatgccgcaggaaacacctaccaagatgccctcgcagcgtaccgccgctcgcaaggtctcacagcctccaccatcgacgtcggtgcaatcctctccgtcggctacgtcgccgaaaactcctcgcgtgtggccatcaacaaaggcgtaagcgtggagctcgagcagatccgtgaagaagaactacacgcgattctcgaatacagcatcgatccacgccagaatccccctgcacaaatcgttacaggtttggctaacagagacaaataccggcacaagggaatgccgacgccgtcgttcatgagtttcccactgtttgctcatctgaatagtgagacattgactggcgcggcgtcgtctgagagcaccgagattcctgtcgaggccttgcttgctcagacaaagacattggatgaagcagctgacatcattacagcggcggtgaagggcaaactggcgagtttgctgtcggtagcagcggcagatatcgatgaggacaagtcgataagcgcaaacggtattgattcgctagtggctatagagttcaggacgttccttgcgagggaggtcaaggcggatgtgcccatgttggatgttatggggacttcgacaattaaggtgttgtgtaagaagattgctacattgagtcgcgctgtagatgtcaagcaagacgagaagagtgtttcatcaccagttggaacaccatag

SEQ ID NO: 128 - DNA, 789 bp, Stachybotrys chartarum
atgggcgatgcatcaattctccattctgccaatgccctcatctttgggggtaacggcaaaacggcccgtcacttgactcgtatcctccggactgccgaaaccccgcacgctgtctacagcgtcattcgtaacccagaccaaatcccagacttggaggcgattggggcaaaccccattgttcaggacatctcaaccggcaccgaagcagacttcgtcaagatcatcgaggcgacccggcccgacgtcgtggtatgggcagctggtggcaaggatcccaagtcggccgaggctgtggaccgggacggggctatccgcgccatggaggccctgtccaaggctgcggtgaagtctaagcggtacatcgtcctcagcgccctggacgtacgcgatcgagacaacaagcctgtcccagactggtacaccgaggcagacgagaagctcagcgaccgcatgtggggtatcatcggtcccatcctgcgggccaagttagccgccgacacagagcttagggtcggcaacgaaacccggaagcttgattacaccatcgtgagaccaggcggcttaggcgaggggccaggccaaggaaagattcgtgcaggcaaagtaggaaccatgggcatgatttcccgagaggatgtagctggtgtcatctatgcggcgatgcaaaacaaaaagacccatgggcttgcattcgacatcctggggccgacggagggtagctatgcaattgaggatgctgtctcgcgggtagcagaaaagcacgaagatacctttgaaggctattattag

SEQ ID NO: 129 - DNA, 1419 bp, Stachybotrys chartarum
atggctcccggtcaggaacctcatccctcttggaaaagggtgtcggaaagcaaatgggagcaagcctatgggtttcaagatgcgttctatggtaggattgtcggaaaggctggtgaatcagcacttttccttgtcgcatcctcaatgagcattaggtttgccggcaatatttccgaggaggagcaggctatgagattgcgaaacgcatggatacagatgaggttcttgtaccccatcattgccgctgtcgcacatggaaagaagagggtttaccagtctcctgtggaaatggcggaggttcatgactgggcagcccggacgttcagagttatgggaaacgcaaccattactgatatatggcataacctggtcaagacggaacaaccaacaatgcactttattccgaaaacgcacgagctgttcttacaggcagaacacacccactttgacggtcgcgggggcctccatttttgggacgaattctttactctcttggtcaaccccaagccagtaaccattggccaagacttgggcaacctacctggacgatcagatgactacgtcaatacgaaagaaagaagaccaggccgcggagtcgacctagcaactcatatgcttcaggcgctagaagtgtcgccacccgagacaccgatttcctatcacctaaccaagacgaacaaagtccctggccatccacttcctcctatcaactcgcgtgccacattcaagttctctccacgagatacaagccgaatcaacgatgcatgcaaagatcgaaacctctcgcttgtcgcggtttggcatacggccgtcgtcctagcttcgcaagacgttcagcgtgaggccaacgcagagcctggttctgcgtattccacttgcgcaaacttcgacctgcgccgctactttaaagataatcatcgtcgggactctgacaagcgggcatacatcggaaatttccattgtgtactgccttacaaagtcaagcctaatggccgcacctttcttgaagttgcccaagacttgacttcattttatcgtttggggctgcaggaccagccggatatctgggctgcactgagaccgatgatggaaggcattggcgagtctttttccgatggaccaccagcagacacaacgcctgcagtgtcgagtctcggcgtccttgaccactttgtcaagcgaaattacagcgggccggcctgtgagtgctacattggcgacgcatggttcggtgtcacggctaccgggtcttggatggagagtttcatttggctattccaggggagcttggtgttgaatagttgcttcaacaggatttactatcttgacgaagaggttgatgcatttcacagcagggtcaggagccatatgatccaaggcttaggccttagtaacgtacttggagactccaggctctag

SEQ ID NO: 130 - DNA, 858 bp, Stachybotrys chartarum
atgactatcgaagcacctaaattacagcaaatccaggcctccgaagggcgtgacgccatccttcaggccgttcgtgcagacggggcagttatcattaaaggactgttcacaaccgaccaagtgaaccgattcaatgcagaggttcagccagctattgacaggcgtgggattggatcaaaccacacagaagaatgggtccaagactttttcggcgacaacacgaagcgcttgaatggcgtggttgcaattagcaaaacctttcgtcacgagatcctggaatgcgatttgattcacgaaatttgcgaagaaatctatctgaaggatgcaggcggttactggatgaactctgcccaagtcatcgacattggaccaggcagcaagcctcagccattgcatcgggaccaatggcagttcccgatattcactcattgcggtccaaatgcgcccgaagccagtatcaacttcgtcgtggcactgactgatttcaccgatgagaatggtgcaaccagagttatccccggcagccaccaatggagtgatttgtcgcaaaacggaacgcaagaagacactattccagccgagatggaagcaggtgacgcctgcttcatcactggaaaggtcgtacatgggggaggtgccaatcgtaccaaagacgcgattaggagagcaattactcttgttttccaatgctcctatctcaccccagaagaagcgtacccgttcatcctggacaaggagactgccaagtctcttactccgcgaggccagcgcatggttggattccgctcgcagttcctcaaagatagccctggagtatggaaacgggactacggcgagatggaggaagtttattgctag

SEQ ID NO: 131 - DNA, 996 bp, Stachybotrys chartarum
atggcggttgttgcagttccaggtggctcaggcgacctgggccgcgttatcacgcatgctctcttcgagaacggcaagcatgaggtttacatcatgtctagaaaacctgtggacgaaaaaacagtaccaagtcgtatatcgcccttgactggcagggcttactcgcccgtgattcaaaccgactactcggaagatgcccttgtcaagcagtttgcagagaaagggatcagcgcggtcatatgtgccttcatcatggattgcgattctgcatcggatgcccagtgtcacctgattcgtgccgctgaccgatctgagcatgtaaagcgattcatcccgtccgaattcaacgtcgaatatgatgccagcgattcagtcttaccttacccggagaaaaggtatcatctcgtcgctcgaaaggagctggaaaggaccactaccctggagtatgcctacatctacccaggcatgtttatggactacttcggaataccaggagtggaaagcagccttcgtccactctctttcttcatcgacccagcaaatgatctagcagtgttgccagatgatggagaagcgaagatgagcatgtcttttacaaccgatgctgcccggtacatagcgttagccttggacctagacaagtgggagcgcattatgacgacggccgtcagcaccgtcacgctaaatgagttggtccgtcttgttgagaagaagttgggccggaagctccaagttcactatcagcctgtcgcgaatctgcttgagcacaaggcgattgatctaccgacaaacgtggaaatagctaggctatatccgcagagatttccagaggggctagatcaactgagagggctaatcgccgatctcgaagcaggcgttgcacttggcgcctacgacttcaccaggctcgatggataccttgatcttgtcaaggcgtttgaagggaaagcacctccaccaaagcgcattgaagacttgattgaagaggcatggtaa

SEQ ID NO: 132 - DNA, 7536 bp, Stachybotrys chartarum
atgattgtatcgtcgaccgaagccggcctgtctagcggtacagtcaaagtaccccaactcatcgtcaataacagtccaactagcacgcaatccagtctatttgatctcatcgagcatgctggcatactacacagccagaagaccgccataatctgtggcacctcaacaattacccatggagagctcaacgtgcttgcaaatggctatgccggagtcttgacgcagcaaggagtcagaaagggcgaccttgtcgccgtggccctaaaccggtccattgaattggttgccgtgttgatggctatcctaaaaacaggagcagcctacgtgccaatagacccggcctttcctgcagaacgaatcatccaaatgatggatgatgcatgcccggaactattcataaccagcgccaacttactcgagaattgcatcttaacagcaagcctgcagtgcctgaccctggaggaggcacggcagagaatagacccgacctcatgtagcaacggagctacggcaagagtgacggaaaatgatcttgcctatgttatgtacacctcgggttccactggaaagccgaagggggtggaagtcagccacggaaatgtctgcaacctgctattgtccatgcagggaaaaccaggatgcagcgagaaagatcgcctgctagccattaccactattgcttttgacatggctgttctcgaactctacctaccccttgtttgcggagcaacaacagtcatcgctcaggagcacgagatcaaggacatggctgctctagtcagtcttatgggacaccacgaaattaccatcatgcaaggtacgccggcgatatggcagatgctgctcgacgcaggttggcaaggctgtccgcgactcgccaaaatcttctgcggcggtgaagcgctttctcgagcgctcgcagatcgcttgctgcattgcggcgatgagatatggaacatgtacggcccgaccgaagcaacagtatatgcaagcatctggaaagtccggcctgtggatgatattataatcgggaaccccataaagaattgctacctttatattctggatgatcagctgtcacccgtgccgtttggccaacctggtgagctttgtgttggaggagctggagtggcacgtggttaccgtaataattacgaactcagccgctcccgatttatcaaaaacccctttcacgacggcctcatgtaccgcacaggcgacgtcgctcgtcttgtggaatcaggcgaggtgaaggccatgggccgcgccgacgggcagatcaaaatccgaggctacaggatcgagccaggcgacatcgaagctgcgataacggctagggacgaaatatcaggagcagtggtgatctgccgtgacggtcgcctggtggcgtactatgtgcggaagatgctgcctcgtgaaaacggagttgctgaatcaacgacaacagcaccccttgagcagatgttacgtccgtggctggctgagcggctgccagcgtacatggtgccagcattctttgttgaaatgaacgcttttccggtcactatcaatgggaaaattgatcgcaaagctcttccagacccgataacagcaattcacatccaacccgccacagtcatgcccacaactgagctggaaagtcgtatcctcagcatctggtccaaggttcttggacacagccgtgtgggcctcaatgacaatttcttcgacattggaggggactcgttgcggattgtccgtgtccagaaagagcttcagaatattctgggccgcccggtttccacagccaagctttttgaacactatactgtcaaagccttggcggcgcatctcaatgctctctcaaaggtggatattccagacctcccgcagatccctgcagaggatattagcaggcaggatattgccgttgtatcaatggcgtgtaggctacctggtgacattgtcactccggaagggttctgggaatttcttgaaagtggtggggatgccatcgcggacacgcctgtaggacgttggggctgtgacacgtacgatcggtcgtactgccatcgaggcggattcatctcgtcggtttattctttcgacacttccttcttcggaatatcaccccgagaagctgcccggctggatccctcgcaatacatgatgcttgagacctgttgggaggccattgagcgagctggttatactgcccaagggctgcgtgacagctctacgggtgtctttattggtaccagcaatatcttgactcatcaaggtctcaatccgtcgacagtccgggatctcgcagatcttgatggatacacggtgactggctccgccgctggtaccatgtccggccgtatctcgtatcatttaggcctccaaggcccaacaatgacgattgacactgcttgctcctcctcactggtaacaactcatctggcctgcaacgcgctgcgtcttggcgaatgcgacatggccgtgtcaggaggaataagccttctgactaatcctggacttcacgtggaattcgatcacctccaaggcatgtcacccgacggtcgctgtcggtcgttttctgcggatgcgcagggaaccggatggtccgagggatcagtcgtcgtcctcttgaagcgactgtccgatgctcaacgcgacggcgacacgattcatgccgtcatacgcggcagcgccgtcaaccatgatggccgcagtgccagcttgacgactcccagcggacatgcacagcagcgacttgttcgtactgctctggctacggcccaactacagcctcatgacatcgactatgtagaggcgcatggcactggcactaagcttggtgatcctatagaagccacggcgctggccgaagtattcggtcccagtcgcgcggagccgaaaccactctacattggttccgttaaatccaatattggacacacgcaagcggctgctggtcttgtgggtttactgaaaatcgtcctagccatcaagaacagtttactgccacgaaccctacatgtcacagagcctactccagcggtcgactggcagggtgccaatatggcccccaacatgagtaaccgtgcgtggccgctggtagaagggcagccgcgtcgagctggtgttagtgctttcggtataggaggcaccaatgcccacatcatcctccaagaaccacccccgttgaaccacgtcgttgataaagagaagttgtcaaggcgggatgttggccctttgccaatacttctttcaggcgacacagacctggcattgcgcgcgcaagttgaaaagcttggtcgccacatctatctccaacagcacgatgacgatcttcgcgatatagcctactccctggcaaccacccgcacgcattttcgaaaacgaatcgttttagcggccacggacaaatcccagctcttgaaggagcttgacaatatggtcagccccggttctctgataatgcaggatactgacgacaatttccaccacaccaagatggccatgctcttcaccggtcaaggcagccagtggccgggaatgggaaaagccttgtcccaggtccatccgatctttcaccaagcattgttggaaattgcacaggaatttgacaaggagctggaggtgcctttgctcgatgtcatgtgggcacctcctggaagtgacctcgccatattgctcgaacgcaccgactatgctcaacctgctctttttgctttggaggtagcgttatggcgactttgggaggtgttgggcgtgaggcctgattttctatttggccacagcctgggcgaagttgtggctgctcacgtagcgggcgtttttgacatgcatgatgcttgtaggttagtggccgcacgtggtcggttgatgcagagtcacagcggtgatttcagcatggctgcgcttgaggcctctgcagccgagacagaagccgcaatcgggcagtttggttatgcagacgacgttggcgtggcactctataacacgccattccagacagtcatctccggcacaatgaacgaggtcgaaagtatcatgggctatttttccaagcaaggccgtaaggtcaggtccgtcgttataggacacgcctttcactcgcgtcaaatggatggtgttttggcagaattcctggccacagtcgagactctccggtttcatccgccgactttgaggatcatcagcagtctaaacggcaaattgatcgacgcagagcaggtgactcaagcgcagtactggataagacagattcgcgagcctgtccgcttcaccgaagggatacagaccttagctggccatggtgtcaacacatttctcgagttaggacctggccaggttctctgcggcctgggtgcagcatgtctttcaaacagcacgacgagtcacccactcacttggctaccatctattggtcacggcaagaatagtgcatcggttttccaagcaagcgtatcccagctacacactctgggcgcggacgtaatatggagagcttttttcgagcctcttggctgtcgccgcattctcctaccgacttatgctttccaacgcaactatcatgttcaccatagcctcgagagacagaattcacgctcgagaggacaccatgtgagcggtgccgggaggaggaacctgattgaccttagcccaccacccgatcgtagccgggtccaattcgacattgcatggcagctcatcggcccagcaaagaccttaccgcgcgggacttggggggttgtaacttcaactagcgatgagacgtgggcagaaagtgtcatcagccgcctgtcgcagaccgaattgaaactgcacccggttgacgcaccagaccaggcggaaaagctcagtggtctgctgtgtttgtgggacgcagatatgaattcaatttgcgaagtacaggatctgattgcaacagcgctgtcacagatccaaatggcagtcgaccttcaattctctcctcccattatctggattactcgccatgcggttggaactggcgttgaatccgacgaccatgcaatgagactgggagttggacctttgctctggggtttaatgagaacagcgcggactgagcatcctgagttgcaactacgtctgatcgatctcggtgtggactcatcgagcgccagcatcctatcagtactgccactacatgaggagcccgaatgtgccttacgtcaaggccgaattcttgttccacgtatgcgggatgtcgtgtcaaagctcgacccatccccacagaagcctcgcatgctgcgcacggatggcgcagtgctcatcacgggcggcttgggccatcttggggcgcgactagcacgatggctcgtcaacgattgtggtatcaatgacctggtcttgacctcccgccgggggatgcaaacttctggtgcagatgcactggtgaatcagctctccaagctgggcgcccgagtcactgtggtagtcggcgacatgtccagcttccaaagtgtcaagtcaatcatggctatgtttagcagtgaccgaccgttgagaggggtcgttcatgctgccggcgctgtagactcgggtgttatttcagcactgacacccgagcgatgcgagacgacaatccggccgaaggcatacggtgcctggttcctacatgaatcaacgcggaacatggacttggacctcttcttaatgatatcttctgtgtccggcatcatgggtctgccaggccttgcaaactacgcagcggctaacacattccttgatgccctggcacatctacgtcgtgctcaaggcttgccagggacatcggtagcatttggcaccttggctggtgatggaggcatggcatcgagacttggtcacaatacgcgctcctatctcgcgcattttggccttaatcctctgtcacttgatgtaggagtcgatgtgattgagaacgcgttggtcagcaaacgtgcgatgactgtagccgccgctctcgacttgccgcagctgcagcgttacctggaacagcagaacggcggaattcctcctcttcttgccttgctcttggtacaaggcgatactgtgacaaaatcgccattgcccaaacgccagagtctacgagatatactagccagagctgaggcggcacaacggccagggattatactcaacacagtccgtcaggttctcgccaaggcgctgggatttaccaaccctgatgatgtggaaacgaatcgttctttgaaagacctcggcattgattccctgattgcagtgcagattcgcaatcagctaacggccttgacaggcttaaggcttccggtcaacattgctttgatgcacccgaacctcggagcgctcggtcaatctctattgtcacaactagagaaagagaatggctctgcagctaccccgtctactctttcgttgaacatggcggctatacgtcaaggctgcgtggacaagagtttcaagtttggggcggggttgcgtgatcgtaaaacacctcagcgtcctaggccgccgaaggctgtattccttactggcacaacaggatttgttggcgccttcattcttaacaagctgcttaagcggggtgtcacttctcattgcttggtacgcgccgagagtgctgaaaagggcctgcagcggcttgtgagcactctgcaaacctttagtctttgggaggctggttttaaggagttgatcaagcctgtcgttggcgacattacccgcccttttctcggcatggaccggcaagcctttgaagacttgtcgaatcaagtcgactctatctgccattctggcgccctcgtggactggatgcggccacttgaggactatgttgggccaaacatcgtcagtgcccacgagattttgcggctcgcctcctgtggtcgtttcaaaggtgttcatctgatctctactatctcgactctaccgaagcacatgggtctagatctcaacgaaaacgacattgagtacggctatggcacatcgaagtacattgccgagaagatgatggcggcagcgcgttggcgcggtgcaagcacttacgtctatcgccttccttacgtcactgcttcggcggccactggtcatttccgccgcgatcgcggagacttcttgcacaattttaccactgggtgcctcgaaattggagagtttcctatgttagaagctgacttgtcctatgtgttgcctgtcgactatctggcagaatgcattgtggctaccatgacgcttgaagttgttaggaagggccaagagttcgatttcctgaattcacaggctttaagctgtaccgagtacttccggcttctcggaacagtcagtgacggtgagccgaagccgattgttgcattcggtgcttggaggcagcgggcgttggcatatgcttctgcaaaccctgggagttctctcgcacgtattggtggagttcttgaaacgtttacagaggaaaatgcgaactctttgtttgagggtcttcccgttggggagcacgtctttggaggtgaggattacccagcgccaaaggtcgacaatcgatttgtgcaacaatacctcagttgtatcagagggtcttaa

SEQ ID NO: 133 - DNA, 333 bp, Stachybotrys chartarum
atggccgagcatccagccttcacactagcgggcctatgcaagttggccgccggcggcagcttcggtttctaccgcacgcgctccaagccatccctcatcgctggcctgaccctaggcgctagcttcgcctgtgcaggatacctcctcaagaaaaacaaggactatggcgcagagcttgccttgggcagcagcgtcgccttgctcggagcgggagcccaaaggctgattgccacgcaggccaagtcgcgcccggccattggtcttaccatcgccggcgggctctcgacctactattaccagaagaaattcagggaatttcgtttcggggtctag

SEQ ID NO: 134 - DNA, 1800 bp, Stachybotrys chartarum
atggcgggctacgaacctgtcctgggcagcaagtccggcctcgtgaacatggcgcagagctcgcacacctctgtcgaggcgcggaatgcgccagacacccagcggcgcgagtggcgggcaaccttcttcagcaggctgccggttggcgagctgcttgcgattgcttgtgtcgcggccctctccggctccagtgttgctatcctcagagcttcgaacggcgtccctgtggacgattgggacgtcagcccagcagtttatctctccatcttgacgactgccatcggagttctcttgcgatttgctttccgtcgtggtgcaacaatcgcatggtggaaccaggcactggacaagtcgacccttactgatttacacgataccttcaacgatcgagagtcgctcttgtcggccctgcgacgagatccccgtaaatggacttttgtgcgctttgcgagcatcttcgtcaccctgatcatggccaacggcccactactccaacaggcatcttacgtagacttgagggaggagctttcctatcctcaagccacactgccgataaggagccagccgttggccaacctgacgaccatccccacggccgcaacatccatctaccagaccgagttcaccgacatcatcaaccagtactacaacagaaaccctatcactttggagccaggtatctgcgagggtacctgcaacgccacggtcgttgtggggggtttcgacaggaggtgcttgactaggcgtgtggacaccaccaccatgaacttgacagagggcgcaaccatgttctatattagccctaccatctcttcgacaaacgaatcgcactcgctcagcattgacgtctactatcgaagcacgtcagccgatattgatgaagacggcctcaacgagatcgcacggtcaggaggagacgcacctgttgtgaacagcctgacctggcatagttgcaaccttacacatgcctatcgtgcgctaaacatcaccattcagaacaccacgttggagctggacccaaccatgaatcctctcgacaaccataccgtcgagattctttctgggtctgacctggaatggaatggcccttatggttttggagttatgttgatcgataattttgtcagctccgttgcgtgggtcatcagtggcgagggtgatgattcaacaggagccccagagtttacaggccagacggcccgtacctacatcgatcgcggcattctcagcaacagctctgacagtgcgtttgaccgaagtatcttgacttggagagaccctatgcctgatatacttcgcgcggttgacgatctatctctccgctatgcagcagcacgtattcccggcacacccaggcgtgccctggagtacttggagtgggtagacgacaaccctgaaacacaagcctacatcgattcggtttctcggggacagaaccagacggtgcagttgacccaaagggtccaagtcgctgtatacgcgttccggcctcttactctttggctcagcgtggccttcacgatggcggccgtagtgggagttggggcgaccatgagaggattctggcatcttggcaggagggtgagcctgtcaccaatcgaggtgggcaaggcgttccgagccccattattcgctggcgtaggcagtaacatgccggcaagagacatcgtggagcaagcgggtgacttcagagtccagtacggggttctgagcagcgcagacagccaaagaggcttagagttggcaattgactctgaatcgtcaatcatggagccgaagaggggcgaatggtacgactag

SEQ ID NO: 135 - DNA, 2736 bp, Stachybotrys chartarum
atgtttattctcaagggttttgtcggccttgctgccgtgaccggaacgctcgggtttaacacccatgcccgtctcagcgttgataatggtacggatacggtagttccgaaccactacatcgttgaagcatccttgggtgccgatttggatggcttggtctctgaattgtcctctcatcgagagaccagagtcctcaaggtgttcagatccgacgtgttctcgggcgtggctgtagaatcgacaaacgaaaatttcgatacgctgcaacagaaatcggctgtttcccgagcttggaactcaaacaagatcaagctcgacatcatcaatgctcagaccttcaatgatgacatcgcagcttctgtctattccgtccataacatgactggtgtggacagactacatgaggcaggcataaagggaaacggtgccatcgttgctgttgtcgatacaggcattaattgggcacattcggatcttgggggtgggttcgggccaggcttcaaggtctctggtgggtatgatctagttggagacgttccctggccatgggagcaagacgagaaagtaccggacgatgaccccacagacacaaacggtcatggaacccacgtcgcgggtattgtcgcggctcaaggagaccaacttgttggtgtagcaccggaatccacattgctagcttacaaagtgttcggaaccgttgatgagactgacgacactaccctcatagaggcctttttaatggcatacgaggcaggggccgacataataacatgtagtgttggcggcttgggtggtttcagtaacaatgcctgggctgaggttgcatctcgcctggtagaacaaggtgtggtcgtcgtaatcgcagccggcaacaacggctacgacggtccctttttcgccagtaatggagctgcagggaagtacgtccttggcgtagcatccgttgagccttccgagcttgtagctccgccgtttcttgccacattcaaccttgacggtcagtcaaacaccacaacattggcctacatgctgggctgggatgaggcgttccccagaaacatgaccgattggccgattgtcccgctttccttcgacacaacagttccagactttgcttgccaacctctgcctgatgataccggcgacctgtcccaagtcataccccttgtccggcgcggggattgtggctacgagactcaacaaagcaatcttgaggcgttcggtgcgcgatatatcatgttttacaacacccatgagcgaacagaagagccatggtccttctaccaggacaattccatcctgagtctcattgaagctgaggccggggaagctatcatcaacacggtcaaagcgggaggtaacgtgactgccgacttttcaatcgaccccaacacaaattattacgggatacataactcagccggcgggcgtccgagtatctttacctcatggggcgggttgtatgatctcactcttaagcctgatctggcagctcccggtggcagcattttcagcacctatctgagaaacaactacgccgtcatgagcggcacgtcaatggcctgcccttacgtagccggtgtcgcggcattatacgtgggtcaatttggcggccgcaaggttcatggtgccgggtgggccaaggacttatcaatgcggctcatggcaagtggcaaggcagtcccttggtcggatggctacacggtggatgactacggttctctggcatctctgctgcaagttggtacagggttggttgatgctctcaaggttttggactacacgacgtcgctctcatgggccaaatttaacctcaacgatacacatttcttcagccgctatcatgaagtcgacatcacaaacaacggagacgagccggtgtcttaccgattttctattcaggatgctggtggctttgaggcttgggcgccgtacagcgaaacactgttcaatacgcctagactgaagatgaatcggcccgaggagctgacacccgtggagatggtgccagatgtcagctttcctcaaggatcattcattgttcaacctggccagacaagaaaggcgaagttcagttttcgataccccaactatccccaaggattagacaacttgtcagtctacagtggtaaagtcatcattacgagtagcaagggagaacatcttggagtcccctattttggaatcgcgtcaaatctgaaggatactctcaggaaggagaacttccgttcaatataccccgtcgttgaatcgggctggtcctacccgttccctaacatgacagagaagtcaagctggaccctcaacttaaccatctattctcaagactatccaaaactgtactctcgacacaactgggcaacacaggagcttcgctgggatatttttgaaaaaggatggacagagcgcaagtggacatatccgccagtggtaggcgagaacggctatgtcggaagcgttgcttactggtttaactcgccgtattactattattttgacccagagacagacgacgcgaactacaccgtctcttttccactgacagacgtcccgcgggtgtcgctcaatagtccgacggaagagtactggtggatgggtatgatggccaatggatcaaagattgtaccaggcgactacgtcatgagattcgggatcctgggtccttttggggttcagcgccatgcagacaactgggatacttacatccatcccttcacaattctccctttagaatga

SEQ ID NO: 136 - DNA, 1587 bp, Fusarium avenaceum
atggcagagtcgaaatctcagatgaacaatgatgattcgagctctgctgccttggatcgcctaccgactcatggcgataccgcgcagctggaatcacttgggttccatagtgagctccaaagaacattctccttaccctctatcgttggattgtgcctatgcctcatgagcacatgggaagcatgtgctgctgtgctcgttcagggacttgccagtggaggagctccatgtcttctctataacttcttagcatcctttgccggctcactcgccattggcgcatcacttgcagagatcgcttccatttatccgaccgctggagggcagtatcactgggtcacagccctagcacctgccagatacaagaagcctgctggctgggtcaccggttggatatccataggtggactaatcgcgctcacctcgtctcccgcgttcctcggtggcctgatgactcaaagcctcataatattaaattccgataactacctagggaccagatggcaagggatgcttttgtactgggcctttgtattttatgccgctgccatgaacgtatgggggcatcgattgctgcctaccgcaaactttatatcaggtgtcctccacggcctcttctttctcgtcaccctcattgttcttgccgccatgtcaaagaaaaacactgcgcacttcgtattcgccgaaacccagaatgaaacaggatggagtagctcggggatcgcctggttcgtcggcatgataagctctgtctatcctctcctcggctatgacgctgcatgccatctggcagaagaactgcccaatgctgcacgaaatgttcccatcgcgattatgggtagcatcggcatcaatggcatactcggactggcttttaccttggtactgcttttctcatgtggccccttggaaagcttacttcaaaccccaaccggattcccctttatacaactttatctcgatgcaaccaagtcgcatgttgctgcaactatccttactatctttatcataatgatggcccttgctggagctatagctggtcttacctcaacctctcgaacgctgtgggcatttgcgcgcgatgatgcaaccccattttcaaactttctgaacaccatggaacggaacgagcatgtccctaccagagctatctggactatcacagctttccagatcttacttggatttgtctatctaggcagttcaaccgcgttcaatgccatcttatccatggcgattatcagcatgtacctgtcatacctcctgcccattctcgccatgctcttcggaggtcgtgcggggcttgccaaggcggattatggtccgtttaaactcggccatgtccttggtactttgttgaatgtcgtgagtgctttttggattgtcctggtgattgtgtttagtgcattccccagtgctatgcctgtttcggcacagaatatgaactattcggctcttgtagttgcgggatggattctctgtggagttgtttattatcttctgtttgggcatctgaactttcggatgccgattgttggtgcaggtgttgttatgggtatacctctggctgcagttgagcacatttag

SEQ ID NO: 137 - DNA, 1515 bp, Fusarium avenaceum
atgttgagaacaatcatcaaaagagcgactgcccagtctaaccgcctttctccagcgcgttatcagcgatatggaggcacagcaacccagcccaagattcctctcataatcaacggccaacaggtgcaaacttctgaatcttcccccgtcatcagccctttaaccggcaaagaagtgtggtctttctcttgtgccagcaaggatcaggtgcacgaggctgtgcaaaatgcccacgatactttcagcgtctggtcccagaccaaggttgccacccgacgagatatcttgctcaaagccgctagtataatggaaaagagacgcgaagagcttggcgggtatatgcatcacgagattggagccaatcaattctaccaagactttattcttgggttgacaattgaggggttgaaggacacagctggcaggatagctggagctgtgcaaggatctaccccggagtcagcccatgaaggcatgaaggccttggtacagaaaaggccttatggagtcattcttggcattgccccctggaacgcacctttccatcttggactccgatctgttcttttcgctttagctgcaggaaatactgctattctgaaaggctccgaatttacacctcgttgttactgggcgatcgctgatgtcttgcgcgaggctggcctgccggacgggtgcttgaatctgatattccattcacctgccgccgctgccagtaccatcgataccctggtttctcacccacatatcaagaagatcaacttcacgggcagcaccaaggttgggaggattatctcttctaccgcagggaagtatctgaagccagttcttatggagcttggcgggaaggcgagtgcgattgtactcaaagatgctgatttggatcacgctgctcttcactgcgcccagggggctttcatcaatgccggccaaatctgcatgtcaacagagcgtatcctggttgatgaatccatctcctctgagttccaggaacggcttggtagtgcggttcgaaagcttttcggtactgcggatgatacccctgctgtcgtggctgcagcctcagcaacccgcaaccggggcctcattcaagacgctatatccaaaggcgcacagcccctcaagattttcgaggatgaacatgcccatgagacagatacaaaaatgagacctgtggtcctgggtaacattaataagaacatggacctctacgcaacagagtcgttcggccccagcgtgtctttgtttactttcaagacagaagaggaggctgtacaattggcaaacgacacggaatatggcttaaccgccgctatattctcaaaggacttaaggagggcattcaagctggctgatggcttggagtcaggagccgtacacattaattccatgaccgtacatgatgaatactccctgccccatggaggtgtaaagagtagtggatttggtcgtttcaacggttatcagggtttggacgagtttctttattacaagactgttacttggatggattga

SEQ ID NO: 138 - DNA, 1467 bp, Fusarium avenaceum
atgggcgtctctcaagagggttatttgtggacaccatccatttccaagcatggactggagacagactcggtcgtcaataactctgaacatattcgcgacaagtacgacgctgtagttatcggcgctgggttcgcgggactgatcgctgcgagagatctttccaaagtccacgggctgagcgtccttcttgtcgaagctcgggatcgcattggcggccgaacttggacaagccgtgagctagaagaggatatcgaaatgggtgggacttggatccattggaaccagcctcatgtttatagcgaacttgatcggtacggcctacaccacaagatcaagccgactctcgcatccgtctctcccgaaagagcattccataacttcggatcaacaatcgaaaatgtcgaaggagatgctcttattcgtgccgtcgaaaagacagcagaggatgtgttcgcgatagatggcttcaccagtcgcaccctcatgccttacccacatgaccctttccgaaaacccaacccatgggtaaactttgatcatcttactatcaaagacaggttggatcagatgaagctggctgtaaaagacagagaattattcgaatcttatatcagtcttttcggtctcaatgctgccgccgacaccggcttcaccgaggtgttgcgatggtactccctggcaggccattctatggcaggagtttatgagcttaccagtttttataagcttggcaatggaggaatgaccgagtttgccctggctgttcttggcgatagtcagtgtgatcggctgtttggtaccgaagtgtccaagatcgaccagagccaaggcaacgtggttattactgccaagaatgacagaattgttactgctactgccgttgtatctactatccctcttaatgtcctctcagatattcagttctcgcctccccttagctccctgcgttctgaagcagcccggcgtggacaaccaaacatgggcgcgaagctacatttcaagctgaaagatccagagccagtttggtttggaacagcttcagtgaacgacagtaccccatatctcttggcgtttgcggatcatactggaaccaaatcttcgggacccgacggcacttactgtgtagcagcagttcgtagcaacactctagacaacgtagagaatgttggccatgtgatcgaagaattcaacagaacattcaagccgacgagtagtgtacaggcctatcttgtacacgattgggccaaggacccttattccaaaggcttgtggagctgttgggcggcaggcagcatgtccaaatacctcccggaactccagaagccacatggtagagtagcttttgctagttctgattgggcgaatggctggcgaggttttatcgatggtgcgatcgagagcggaaagagagctgccagggatgccaaggggatagtcctcgctgcaaatgctactgcaaggctgtaa

SEQ ID NO: 139 - DNA, 228 bp, Fusarium avenaceum
atggtattcgagaccaggccccgatctgacgtcttcaaggtcgatgccacccctggcatccctcacgtttggtacaccgagatttttggcagtccaacaactgattcaattaagaatccactgactgctgcctatcttcgcatcgatagtggaccaccagtgactcctcccgtctatgcctttgatgaagctggtattgttattgaagatgtgtcacaggagaagtaa

SEQ ID NO: 140 - DNA, 768 bp, Fusarium avenaceum
atgacggtgcgacttgctggtgtcgatgagttactgtacagcatctcgcaggatgacagtgacgttgaactggcgcttcttgagctatgggatatgttgaaagaagatcgaggtgatgcgctgcggttaagcgacattataccacatgttttgctccgtgttggcggtgagcaggaatgctacgattttatcaagtggtgggctttccatggttcgaaaccaggcatcgacaaccgcaatttgccattctttaacaccaagggagccaatgcctgcgaatcccctcacgcactactccagacaggactcagccttagccatctcgttgcgctcacacttctcaaactacgactttttcttgacctggatgctatttccagttcctggtttgacaactcgtttggatttgacggtaacattgcctctatcgatcgacctctcggagaacttgcagaaggcattttcgaatcatccgactcaagtagggtcgagagactcgccagagacatccaaaaacagtatcttgacctgtgtaagcgggtgagtgctacgaactcttacttctgggagggtctagttacagatgagctgccttctgcgcctgggccttatgtatctgggtcccttgacgaggcccggctcgttctacaccactgtcgacgggcatgggacgcaagtgcagatgctctggttatggttgaagcttatgagacccaaaacgatggatatcccgatatttctggaaagatgacgtggcactgtagttga

SEQ ID NO: 141 - DNA, 1629 bp, Fusarium avenaceum
atgtcagccctcgtcttcaaggtccacgaccgtcttgttgtcaagaagcagtgcgctgatgggactaccgaaccagccacctttctcgacaatgactccatccgtcccacaccagttcaagaccggacttggacttcaattacatactcggctttctggttcgcggctaccgcaaatgtgagcaacttgtacgcggcttccaccggccagtctgctggcctcagcatgtgggaagctctgggttgctcattcggtggccagttggtcgctggttttctcatggtgctcaatggccgtgctggttcactataccgaattccctttcccgtcgcgtgtcgagcgagcttcggaacatggggtgcgttgtggccgaccttcaatcgtgctgtcatgtctattgtttggaacggtgtgaatgccgttcagggagcccagtgtctatacgtctttctccatgccatcttcccatccattgcaaacatcccagatatcatgggccccaagtctgctctcaactcggctcagatgctctgcttcttcctctactggatgataaattgcgcctttcttttcatccccgtaccgcgcatgaagaagcttgttcacatcaaggttggtgtgtatttcgcggccaccatcgccttcgtcgcctggacattgtcactatcaggcagcgtccgtaaaaccttagccgagccatctactgttaacggttcggaaaagtcctggttgatcctcaagttcttcttcctaggacttgccagctgtggcacctttatttccaatgcctctgacctgcaacgttatgcctctcggcccaatgatgttattgccggccaggtattcagcttcccaatgtcgaacttcttggttggcgtttttggaaacctgattgcggctgccagtaagagtatttttggcgaggtcgtctggaatccactcacgaccctggatatgctcatggagggcgatcgccatacatccgcaaatcgtgcgggatgtgctttgatctcgttcgcttatgtatactcaacagtcttctccgccattttcgagaactccattcccgccggaaacgacatagcagctctgatgcccaagtatatcacagtaaagcgtggcttcttcatctgtgcagctgtctttatcaacttcctgagctcgtaccaaatattcctcagcgctatttcaggtatcctgatctgcgattactacctcatcagacgtggtctcttcgacatccccatgctttattcggggcacaaagattctacctaccacttcttccacggttttaaccccagggcgtttctagtctatttgattgctatcgcacctaacttctatggattcctctcccagatgggtgtcaatgcaccattaggcatccagcgattttattacgtcgcctatcctgttggactgttgttagcgtttggaagcttttggctaataaacgtactctacccgacaaagaatatccctaaattgtcagggtggcaggagcctaaagattttgtggaggaccatgacgaaacctttactaacgttgtgattaattcttctgatacagcctcaggtgatcaggaaatgggcaacatcgagaagtctaccatgcagaagtattga

SEQ ID NO: 142 - DNA, 1104 bp, Fusarium avenaceum
atggctacgaccacagttgagaccacagccccagctgcggaatttacaacggtgcagttaatgacaccatatggacctgtctcccgtcgagtgcgctgcggcgagccacgcactccgacacttgatgaaatgcccattatagacctcagcaccctggatggagatgaaactgcacgcagagccctagccaccaagattaaagcagcggcagagaacacagggttcttctacgtctgtaaccacggaatcccccaagatttgatcgagggagctgtcgaacaggtcaaggccttctttgaccaatctttagaaaacaaggatcgggtcgcgttcgataaagccggcaagttctgtggttatcacgggattggaacaacgcaaatcaacaacaaggaaaccagagacaagaaggaaactttctctatgcgatatgacactcgtattgacccagcccatgatcgcattgatgatataaattccaacttcgatgccacagattacgtctgggatggtacaagtcatcttccgaacttccgccctgttctcactgagttctatcaaaaacggttgatgctggcacgcaaacttatccgcctctttgcacttgctctccagctaccagaagactactttgactctattaccaccactcccggagctgacgccgtgcacattcactaccctggcactgatgttagcgacacgggcaacaccaaggatgtcgacgtcggaattggatcacacacagacattcagtgcgtgacattgctctggcaggatatgtcaggtggtctgcaggttctctcagcggatgatgagtggctagacgcccggccaatcgagggaacactggtcatcaacattggtgacttcctacagaggctctctaacaaccggttcaaatcgactgtgcatcgtgtctacaaccggcaaaaggcatctcgttatgccatgcctttctttctagggttcaatccagatgcggtctgcgaggttgttccgacatgtactgatgaagatcatcctcctctctatgagccgatctcatgcggcaagtggcgtgactctcgtcttaagttggcggaaagtggaaaagtggcgtga

SEQ ID NO: 143 - DNA, 1503 bp, Fusarium avenaceum
atgcccccatctgacattgtgttcccgttgcatgaatttgacgactcacctatcaatcggtacacgcaacactggactctgcgatttgatgccgttctcgacacgaagaagctatgcgaagctctcacgcaccttctaagccagggcgactggagaaaattaggtggccggttacagtttaacaaggccggcaagcttgagattcatgcaccaagaacatatactcaagaacgtccggcatttcaatattcagaggagatcttcccagtcaaaaccacggatcatcctgtcgcgaagaacctccctagggcaagaggcaaagttgaactgtttcccggcatcacttcgcaattcaattccttgaccgttggccctggatggggacgggactttgatgaacacattcgtcacaaagagcccgtcattggcgtccacatagctctcttcaacgacgcaaccttgataagccttcgctgggttcacctggtatgcgatttcatgggaatcaaagctctggtcctggcttggtcaatggatctttacgggcgttacgatgatatccctccatttatgggcgcattcgacgaccctttgaaggatattggctcagtgccgcccgaggagccttatgctctggctgatatgaagctgagtcctgaagcgttcaaaaagacctacgacacatatttggagcatgtcgcggcatacccgataactgtgcgacgcatgatagtgctgccagactcagccttgcaaaagatcaagatgaacttcgtcggtgggcatggttcggataggcttgaagtcattccaaagggagcactattcaatggtcaatttgtaagcgacgctgacatcttatctgcttgggcggcgcgactctgctgtagtatccttcctgcggtggatcgtcccgtgcatataatgggcatgtatgaggcgagacactgtctaccagaaacatttcctcaaaataaggacaagccggattccagccccgtcttcatcgccaatgcaactttctcgacctcgaccaacaccacgctacgagcgcttcggcaacagccgctcgccagaaccgccctcttggtaagggagtccgtggcgaccttgaccaaggcccctcaggtgcatgcacagctacatcttttgcgagagtcatatgcgaaggacaaagagaacccagccgtatttgcggctgaggactctttcatcttggtcgtgtcgaacttcagcaaaatggcttttttcgactcaatcgacttctcccccgctgttatcacccccgctgaaggtggtcatggaaagtctccgggcaagctcgcttggcaccagtggacttcgctagagcacaccgtgcatgctcggaatatgttccaggtgggcggcaaagatggccagggcaatacgtggatgatgggactcttgccacccgagacctgggcgctggtagaggagcatttagccggtctctcagggcccaaggcgctaagcaagttgtag

SEQ ID NO: 144 - DNA, 9594 bp, Fusarium avenaceum
atgagccctccagccccgatcgccatcattggcgtcggctgtaagcttccaggtggagctaataacttagataacctttggcaacttctatctgagggtcgtaatggacagacagaaattcccaaagaccgctggaacgcggacgcgtggcacgacgcttacccagatgcgaagcagtccatggtaactaagcgcgggtattttctccaagatgacatctcccagtttgacgcgaagttctttggaatttccactgcggaagcaaactcaatggaccctcaacagcgtctctttcttatgacgacgtatgaggctctcgaagacgctggtattcccgtcgagacactacgtggctccaatactggtgtgtatgccagcatattcgagaggagttacgaccgcatgggtcacaaggacctgtcgacaattggcaggacacatttgaacgggacaggcgaatctatcctctcaaaccggatatcttactgctttgacctacgaggtccctgcatgacgattgatactggctgctctggaagtttggttggcttgcatcaagcttgccacagccttcgattgggcgagtcaaatctcgccttggttggtggctcacaactcgtcatacagccagacgttctaagcataatgagcggcatgggaatgctcaacccagatggaatatcctatgcgtttgactcaagaggcgccgggtatggacgcggtgaaggcgtcgctacaatagtcctcaagcgtctagataacgcacttaaagatggtgaccggatacacgctataattgctaattcgggcatgaatcaagacggcaaaacgcccggcctgaatacaccaagcggtgaagcacaagctgctctctcgctccgtgtgtaccaagaggctggactgaatcctgctgatacatcattcgtcgaggcccacggtactggaacacaagcaggcgaccgcgaagagatagcgtccataaataaggtcttctgcgaggactctggtaggacagatgacctctatatcggttcagtcaaaacaaacatcggccatcttgaggcaacatctggtattgccggcttattaaagtccatacttatccttaagcatggccagattcctgccaacctcaacttcatcaaaccaaagccgtccttgaagctctatgagaagaagataaagatccccagtgaacttacaaagctgccaacaccacgtaataatggacccgctcgagtatcagtcaattcctttggttacggaggaaccaattgtcacgttattcttgaggctccagattccaaacaccagcttaacgggagtacgaacgggacatcgtctcataagaataactcggaactgagtaatggagctaccaatggatcctcgaccgctcacgtggcttctttgaacggatctgcaactgctactgatgccgctatcactcatgactctattccacaactgtttgttctcagtgcatcaactgagaaggctttgtcgtcaacctctgagaatattaagcagtgggcaaatactcacccgctggagcctcagattctccgaagtctttcttacacgctaggtgcttgcaaatctgctctttcattccgccgagccatcgtcgtgtcgacatccgcggagttgctagaagagctagaccaaacagttcacccaaagagagcagctactcttgcacctctcagctttgtcttttctggacaaggtgcgcaatggcatgcgatgggacgtgagctcatcagctcctcacgatgcttccgagagtcaatagaggctatggacaacacaatccgccaggagggagggacatggagcctcattgacgagctggccaaggcggacaacgagtcacggattaacgaggctgagatttcccagcctgctaccacagctatccagattgcacttgtggatttgctcgacagcctttctataaggcccagccgggtagttggccacagctctggtgaagttgccgctgcctatgctgccggtgctctgagcagagacaacgccattattgttgcctatcatcgtggtgttgcctccttgaatgcgaaagcagcggctacagtgcctggttcgatgatggcagtcactctcggagaggccgaagcgcagcgatacattgaccagattaccactggaactatcagtgtagcctgtgtgaacagcccatcgagcagtacaatctcgggagatgtggctgcaattgatgagctcaaatcgttactcgacgctgagggaatctttgcacgcaaactcaaagtcgatactgcctatcactcgcatcacatgcggcgaattgcacaagattaccatgaagcgatgcgaaatatcgagtcttctgacgtacggagcggtgtcacattcttctcaagtgttagcggtacagtcaagtcatcaggattcggcgccgactactggaaagacaacttagtctctcaggtcaagttcagccaggcgttggctttgttgcgcgatgatcaattaaagaacgagccagggatggacacgagcgttttcatcgaaattggccctcattcagctttggcaggccctgctcgtcaaacactaacacaaccaggaagcgcaaagttcaaatttgaatatttgtctgccctggttcgtcataaagacgctgtacagacggtgttatctcttgccggcaagacttttgaactaggtctcaaggtcgatctggaggccgtactcaaaatgactgacgaagcagagcccgagattgtcagggatctaaaatcgtatccttgggatcttgctccgttttggcacgagtctagactcagcaaggctcatcgctttcgcaagtttgcaccacatgacttactcggtctactggacccggcgagcaccattcaagagccgcgttggcgataccacatcaacttggacgccctgccttggctgcgtgatcacgtagttgagggcttcacattatatcccggtgcaggatacttgaccatggctatcgaagcgatgaagcagcttgtgcagttgagagacgctcaacagtcgattgcaaagttcatcctccgcgatgtaaccatttcgaaatctattgtcctcaacgagtcggataatgacgagcaggctggcgaagttgaagtattactgagtatgtccacctcacgtcagtatgaaggcagtcgctgggagtcattccgaatctggtcatatgacaatgtcaatggttcatggtccgaacattgctcgggtgagatcacggtcgaatgtgacggcactgaggatgatgaggtaaacgggacaagagaagcggacctgcgcaaagaagagtcgatgcagctactcaacgatgcccggcaaagctgtgatttggagatgacaaaggccgagttctatgagtatgccaaacttaccggcaaccaatgggacggggctttcagtcccattgattctctgaagtatggcaacaaacaaggccttctagatatcatcattccagacgtggctactctgatgccatatcgctcattccgacctcatgtcattcacccaatcacccttgatgctgtccaccaactcagtggcatgctcttcaagaagtttgtgtcaaacgctccttgcgtgccgaccaagattgctcttctggaaattgacgccaatatttcggcaaaagctggcgatagtctgactgctgccatgcagatcgaaccagatggatcgaaggcatctacaggccagtcttgggtgtttcaacgagatggcgatggtgagctcagacccgtcattaaacttttggtcaacctaagagccattggcgaggcgcatcaagatgaaaaccggcctttcgttcaggataaggtaaaccgactggactggaacctcgacggagactttatgacagaaacgtcattctcccactttctttccaccacactgggcttggatgagaacatgacatacaactatgaaggcagcaaggtttctgctgtcaaagccgaggagagcttccgcacagctgatcaagcagcctctatctggattcgagatgctctgatccatattgaggctaacaacgttgagatcacgagccctcatctagtcaagtatcttggatggatgaagaagtgggtcaactctgactactacagcgagatcatgtcaggcttgagcatcgaggatgaagtcggcatattgcagcgcattgattctctcactgatgcacccgagctacaactgcttgcacgtgtcggtagagcccttcccagcatcctaagtggcacactcgaacccttgagcgtcatgcttgaggggaacctcctcatacgggcttacgagggtggaacttttagtggtgactatgaggctgcagttgcgtatcttcaacttctcaccttcaagaatccacgccttcgctttttggagattggtgctggtacaggaggctgcacaaagcgacttcttgaaggaattgttggccgcaatggcaggcaagacctcccaattgagcagtacacgtacacggacatatcaagtggcttctttgaggaggcccgcaggacattctccgactgggagtcttgcatggagttcaagacattggacgtggaaggagatcctctcaagcagggttaccagcccgaatcatatgacgttatcgtggcatcgaatgttctacatgcgacgaagcggatggatgtcacgatggagcatgtgcgaaagcttctacgacccggtggaagcctcatcctcgtggagaactcacctaagggcgcagtcattggcctcatctttggcacgctgtctggatggtgggctcatgaggatgaattcagagaggacactgctttgatgtacagggaacaatgggacacgatcctgtcgcggaatggctttggcggaattcatgttgcacgcaatagcatgatggtttccaaagctgtgcccttgttgaccaatgggcatgctgcgggaaacaacaaagttgttctcattaaagacaccgccgatgatgttattgacgagattgccaagcatatcaacgataattcgactgaggttgagataagtgagcgcagttgggatcaattggacgtcagcgaggacacgctctacttggtcattgatcgggctgagacacctctactcctcgaccctcgacctcaactctttacaacactcaatgctctccttgcctcgaaggccaaaatcctctgggtagtcactcaagatactcccgatcccgtgtccacagcatacaagggcgtggtgaatgctgttgttcgagtccttcgtcgtgaaagtggcaacactggatttgtcaccctcgacatccgtgatcctgctcctgacccaaaggtggccgggcaagtagtgtccgatatcttgagaaagtgtttttggccagacacctctgatcaaaagtctgtggaacctgaattcgcgtacgagaatggtcgagtgtcgattcctcgtgtgttgccagatacgaccttcttgaaatgggctcgaagcagctgggatgacccaacgactgcgactgagacagagactgctcttcatcaaggtgacagagccctcaaacttgaagttgctactcctggtttgcttagctccctccgattcgtggatggtgacttgttgcccgaattgggtgccggtgagattgaagtcaaagccgatgcctttggcgtcaattacaaggatgtctgtgtggccctgggacaaacgaactccggtaccgaaatggtcggtgaatttgctggtgtcgtgacagccgtcggccaagacatgaaagatctctatgaggttggagacagggtcatgggctttggtgctcagccatacagcaacctgtctcgcgtcaatggttaccatgcccacaagacacccggttcaatgagtagcattactgctgcttcgatgtcttatgcatatgtggcggcataccaatgcatcaagaacctggctcgccttgaacagggtcagtctatcctcatccattctgcatccggagctgttggtcaagcggcgatccaacttgcccaatccattgaagcagagatcttctgcacagttggaagccgtgagaaacggcaattccttgtgaatgagtacggcattccagaaagccacatttattccagccagaccggctcattcaaacaaagcatcatgcgtcttaccgctggagagggtgtagatgctgtgctcaacacatctacaggagagatgctcagagatagtcttgactgtgttaaaagcctgggcatctttattgagctggggaagagtgaaatgcaaaaggcctctcgtctaagcatggcatctttcgagaagtcaatcacgttcaacacctttgatttggtaactctggctgcacgaaagcctaagaagatataccaaatgcttggtgaaatcaccgaacttctcgattcggggatactgcgcccagttcagcccattaacgagtatcccatcgagcaggttgaggatgccttccgcctcgtgagtgcaagaaagcacataggaaaggttgttctcaaggcacagtcaacatcagtagtcaaatgcctgccagcaaagccgacgcctcttcgactccgcaaagatggcacttacatcatcgcaggaggtctcggcgatctcccctcgcggatctctcgctttttcgctgcccgcggagctggccatatcgtctccctttctcgacgcactatagacaaggagacgaggcggagacacgtggcagcagtggaagcgcatggtggcaaacttcacatcctgaagtgcgacatcacgaacgaggagcagatgagagaagctgtctcatattgtaatgggttacctcctgttagaggtgttgtgcaaggcgcgttggcgctgagagaccgaactttctctcaaatgactgttgacgagtggaagcagccgctccaacccaagattgttggaaccatcaatcttgacaggtttttcgccagcccagacttgtccttctttgtggcactatcatctatcgtgtctgtcattggcaagtctggtcagtcgaactacgcagccggtaacggtttccaagacgcctttgccagggctcatgccaaccacccgcacactcaatatgtttctctcaacatcggcgccgtctccattgatgcccatggcgctttggaggcaacccagaacgagaccgcaatcagtactatcagggcaagtctccgtcaaaacagtgtcatggatatctcgtttgacgagtttttcgcaaacttcgaatacatcatgaccgattctgctcgaaaggacggcctccaccagtccatccaagcagtaacgcgtcaatctatgatggaagccaatgacgcttatctcctcgataatcccgttttcagcttactaccaaaggcagtagagaaaaaggccactggcaccgctaaaaccgacaagatcgactttgcagaggcactggctggagtgaaaaccatggctgaggcggagcagctgatccaggacgcagcactcgccaagtttgctgtctttctcgacaggcctgtggaggagattcgagttgatcagtcgctagccacgattggactggactctctcgtcagtattgagttgaagaactggatggtgcgcacattccaggtcaatctgcagacatctgaattgagcggtgccggcagcatcacggctctcacggccacggttgcttcacgatctaagctgattcccgatgaggtccgccaatcacgcccgaaagaggatgctcctgtcaaacaagaatcagctgtgtcgaaacttgaacagtctcatactgatcatggcttctattgttgccgtacctgcaaggatttgcccagatacccgctcgtcgacctagacgaggccgtcaaagaccttctcaacagcgtgggtcacttctctcacactcgggatgaatacgccgagctcagtcgcaaagcgcatgctttggcagcaccaggtagtcttggtcgcagactctacaataagctgcgtgtcaaggctgatgatcccaacgttgagagttggatcgccgacctacttctcaaggcactgcatctcaagcgcagatacccgctggcaccgttcggtaatttcttgggcacacactttgacagcccgacacctcacacccaggcagagcgagcggcgctcctgactacaacgttgtacgaattcaaggccgatcgtgacgcgcacaagctggaacctgatttccttggtaccagggctaactgcgggcactcactgtcttggctgttcaacgctgtaagagagccaaacgtcgactgtgacaaaatgatgaggtacccagataatgagtacgttgccgtgttgcgaaggggtcatctcttcaaagtcccgctgaagcaaggagatgtgactatctcatatgacatgctcaaggcaacgtatcaggcaatcgttgattcggacttgaaggaccgctcctgggccggcatgttgaccactgacaatcgcgattcatggggtttgaaccgacagaagctactctcactggacagcagaaatacagtgtatttcgagacgattgaggcttctgtattcgtcatgtgtctcgacgacgatagccccatcacgcgcgcagaccgagtccactctggctacattggcgactccttcaaccgctggcacgacaaatgcgctcaacttattgtcaccgccaacgggcgttcggcaaccatcttcgagcactccatgatcgatctcatgacggtctctcagctttcccagcgactgcaaagtgccattaccacccatgactctggcaataccacagcaagtaacggtagctttgttatcgatgcaaatattctcaaggagattcccttggtgacgactgaggacattgatagtcacatcgagactctccgtcaagactaccttgccatcacatccacaaagcaatatgtcccccatctcgttaactcatttggcaaatcccttctgctgagccactccgcgcccatcaaggcgactgtcgacctaacaatccagctagccagtcgattatactttggctacttgccagccagttgggagacggtatcaacagcacatttccaccttggtcgtccagagattgtgcaagtggttctgaagtcagtcatggacttttgcgacgccgctcttgacgacgccgtgccacggagcgaggcacgcgcaaaactcctacaggcagcacgcgagtgtaatgcgcagatcgcaaagggaaccgagggacgcaactacttccggttgatggatgtgatcgaaaccatgtcgcaggatcagaaagacgaagagatcccagaactattctccgatccggtctggaagagaggctacccgcagctgattatgcaaacaatggtggaaacgaagctggcagaagatccgggcttcactatgccggatccagagtctgtgtggatgaactatactgtgtttgatgattcgcttgaagtgtgttttgttagtccatcgaagagtgcagagcgctttgcggcggctctggaccgagcagcagagattatgaaaaacattatctcatcaagggatgtgtag

SEQ ID NO: 145 - DNA, 2694 bp, Fusarium avenaceum
atggcatcgtctttcttagcactgtcgcaaacccttggaggcatcacacacaccaagatcagcgaactgggaaagcagcgcactatctatgaagcgcgaaaggataagatcctaggccaggccaatcaagaaaatgaccgagttgcaaaaatcaacctccttctagagggagtcgagagtctcaaccccgaaggattcaaaagccccgcaatcaagaacatcaaacactggctcagtcagtcaaaatatgatgtgtctgttccaagcgagttcatgcagtcacatgaagagctgctccggtcgcatctagaggtgccaagtcggaaactagcactgggccacctctacgctcggctcataaccgaatggatggattcctctgtcagtggacgcccaggttcagaagaagagtcttttgaggttttagatcgacaaaaagagaggctgcagcagttgtgcgacaagttcgagcgagtggtttttgagccgctggagaccgatgaagttgagattgacctctacctcaatgagctattccaaggcgaacaagatgatgagagttccaagtcacttaaagagcttagagatactatgagtgactcgtgtcgacggatctttggtgaaaaagcgccgttcgactccacgacgctcaagtggtgtatcaacgggttactcgctgaggacctgctgagcgatcagaaacaggccattcttcgagactttcttgaaaagcctgttgttttgggggagatctccgatgttctcaatatgcgattttccaatgtcgacagctgggaatgggatgctggggaacatggcattcctgttcttcctagacagcagttgaatggtaaatacagaatatggatggatgaggatgtgttgcaagcaatcctcattcactacattggtatccagtgttgcgttgatctcaagaaggctctaagtagctttatttcttccgcaaactctttctggaagtggaacactggaccgcagcctacccatgacgagatgcaccgtcgccggtattacatgtgcagaggagccactgcaagatcaaacaccaataccgagagacaagggcaatataaaagtacattcttcatgtcacaactgccggagactgttgaggccattgggtctgggggctatactgactcaccagaggagcaagacaactctaaaaagccaaacattaagcagcgcctgctgcaaacgctcgccaccgaggccatcatacacaagactttgagcggcgaagttgcattggtacagactgatctggagtggttcgccacgggcctgtcccattcaactatcttttccaccatgcgattcttcggctacactgaaggggccatctccttcttcaagaaggttcttgaggcacctctcaacgtgcagtcttccccagactctccattgacaggcagcccaagaatgcgccgtcgcggagtacccatggctcatgcaccggagaagcttctcggcgagcttgtactcttcgttatggatgttgtagtgaaccaacaggatggtatgctactttaccgacttcacgacgacctttggctatgcggcgagccacagcattgtaaaagggcttggattgctatgaaacagtatgcggagattctcggcctcacgttcaacctcagtaaaaccggttctgcgtacatcacagcggatggaaaggcgaaggatactgaggttgcaatcgctttgccgcaaggtccggtacgagttgggcatctatctgttgaccctaactcggggatctggaagatcgaccgcgagcaagtagagcaacacatgagacagctgaaaaagcaattaaacgaatgcaggagtgtactagagtgggttcaaacgtggaatagctgcatgggacgcttctttagccacacgtttggtgaaccggcccactgctttggcctacaacatgttgacagtatcctcgagacttaccagctgatgcaacaatttttattttcggaaggatcagattccatacagaacagtcatggagccgttaaccacgtcaagcatatgataaaagaccgattcggggccgatgtacccgatgccttcgtccatctacctgagcgtctgggaggactcggtttacggaatccattcgtgcccatactgactattcgggagagcattgcgaaaaggtcgccggcctcaatcattcaagagttctttgacgcagaaaaggagagatataagcgatacaaaaagcacttcgattcgctgccaagcgttgacagccgcatcgatgcagctgtcagggccacatggagtggagaaaccgttagctccgaaactttcaagaacctgctgtcgactgaggaactggagagcttcttcagcatgaacgattacacgaaatacagggagcttacgagctatgccctgtggcaggcttatctctccttgcagagcctgccgtccgctatcagcccggacatggactctgacgttgcgcagaccatcagccaggaattgggcgtcagtgccaatgatgcgggtagtaagattcaggaagctcgatgggcgttgcaaatgtatcgggatgggttgcgccgtgactatggagggttgcgtcttgtggacaaggaacatcttccgctgggtgtgttaacattgctacgtagtagagcagtgacatggaccatggttctctaa

SEQ ID NO: 146 - DNA, 1161 bp, Fusarium avenaceum
atggtttcctttaagatcctctctctcacaggcggcttactactggctaactttgccactgctcatcctggcgaaaaacatgaccacgagcacatcaagagacagatccaggcacgagatactatcgccaatattggtcagagatcattgaacgcatgctctggttccacgcatgccaacgccttgaaggcccggtccatttcacgtcgggcccgaaaggttcaagatctccgagagaaacttggtatcaagacatctcctagaaagcaccgccgagatgaagaggatattgttgcttgggaggcaattaatcacaacaaaaccggcatttcgaaaaatgatatgttcactcccctcgaaacagtctttggcgccaactccagttgtatcctatcccctgaggtcactgcaggcccatactatatcgtcggcgagtatctgcgttcgaacgttatcgaaaaggaacactgtgatggtgtccccctgttcctagaggttcaatacgttgacgtgtctacctgcggaggagtcccaaatttggctactgatgtctggaactgcaatgctacgggtgtttactctggcgtgagctcccaggctggcctcaacactacattcctccgtggcatccagatcagtgaccatgatggtgtagtccagtttgagaccatcttccctggacactacgaaggccgggccacacacacccaccttcttacccacgccaatacatcggtttcatctaacggcaccgttcaagtctggaacagtccagtctcccacatcggacagctcttctggcctgaagatctgcgcgaggaggttgaggctcttgcgccctacaacactaatactgtcgaagttacaaccaacgaagaggatatgtggtcgatcctccaggctgacgaatcttatgatccttttcctcagtatgtttatcttggcgatacggttgaccagggtatttttgcctggattcaaattggtatcaatactaccgcagaccatgcttcagacgagtattatggcgttgctggatttctagatagcaagggtggccatgccttggacagcggcattggtggtggccagggaggtggacctcctggtggtagtggaactcccccttcagggcagcccactcctaccccttcgtcctaa

SEQ ID NO: 147 - DNA, 1248 bp, Fusarium avenaceum
atgtcgtcgagaaagaatgtcatctttatcggaatgacgcaaaatggcaagagttccttaattcaacagatcttgaaatacgccaacgaggacgagatggcccgccgagtggcaattggtcaaggcaacatcgctcaaacccaaacgtgctctcaatacgatgtcgacattcctctgaaaacccacaggctccggcaaattaatggccctgaacatatgcaggagtatgaccgtacttatgtcactccgggtcaggacttcgagttcgacgacgccgacgagttcacatttggacacgatgtagaagattctggcgagctcctgtttctgcggctgatcgacacgcctggattgagtgactcgggaaatactaaagcctcaacctcaggattacgagtcattgatgagcgtcacaaactcagaatcctcctcactcttcaggaagttgaacaggtccacgccatctgcttcgttgtccggcgcgacactaattacggaggtgacttccaggatctggtgcggaggatgatttcgctattgaccttctcggttcgatctaccacgtggaatctgcaataccacatcattcataccaacattgatgtcgacgatcgagcaagtgatacatgccaggtccggcaacgggagtttgatcaattcggcccagcgggtgctattcaccactttgttgacaacacgccactcgtggactttccactagatgtttatttttcgaaccactctctatcaacattgttcaaatcgttagctaccgcaacgctggtaaacttctcggacctctactatgccaagtcctccgagcatgtgtgcaatgaccaagcattgacaagctcagtggagcgcgacaaggttcaccttaccgaggaaatcgaagactgccgcgaacagatcgcggaattgaaaaaatacattacacgctacaactcaagcgctgctctaaatctgaaacgtgtggacgaatacaaagaaaaaattgctgagatcgacggaggtcgtgaagagggctggaccgaaaagaacgtggctggaggaggttcgcgactgttctccttcagtacaatggtgcctattgcgcgcgttgaaaagtcttacgatggggacggtgactgggaattggaacagcagacatcaacatattaccaagtcacattacaaccccactggctctacaaagcctacggaaaaattacttataatgttattcttataatgttagccaagatgtga

SEQ ID NO: 148 - DNA, 405 bp, Fusarium avenaceum
atgtcttcagctgatcagaacgttggtgccatcatcagtctcacacctcctgatgagggcgacaacatctgggtggccaagcaggtcgatatcgcccgctccctgcctcctggagatatccaaggccgccacagcatcgactggagctttggccccatcaagatcactggatatatcgacaccaacacctatgagattggtgtcagtatcagtattgctggaatcagtgttggtaatatctttggaaatctcaaggatggcgttggcctcaagatcgatctgtttgtcgccaagggtgaagttcgactgtatttgaagaacggaaatgagctctgggttcaccttgatgttaagatcacctttgatggacattttgatggagactacaagatcacctctttctag

SEQ ID NO: 149 - DNA, 1596 bp, Fusarium avenaceum
atgactgaacaacctgtcatgttttcttactgctcggctgaagccaaagtgccagagtccagtcaacttccttccggtaacctgattacacaagatgggaggccaggctttttagccgccaacaagaatctcttctggcccaacggttcgaagctcaaggtcaggtttctcaacggcactgcagtacaaaagaaaaagactcgattctacgccgagagatgggagaagtacgcaaacattgactttcgcttcattgaagagggagatgctgatatcagagtcggattccgatggaaaggagactggggatcttggtcatatgttggcaaagatgctcaaaagtttgcccttggccagaattcggcaacgatgaactttggcgatttggatgataacagccgcgaggaagtgtattctcgggttgtcacacacgaatttggccatgcaatcggctgtgttcatgagcatcaggccaaccccatcgaatggaacgtcgcagcagtcattgcgggttgcaaagccctgtacggctggaatgaagaaacaacacgaagtcaaatcatcaacaaagaggactttcgagccctcgtcaaaacagattttgaccctaactccatcatgtgttactactttccagcctcgtggaccgccaacagtatcgccgcacccacaaaccttaacctctcatctacagacaagagcttcatcgccaagatctaccctttccagacgcgcaacgaaggagaattgagcattgatcccagtatccgcccctggtatccccccgttgccctaaactccaaggccatcctttttacccctccttatctcgtggctccgcgtgtcacgctcgggttgaaacttctcgatgttggtaattcgggtaatatcagtgttcgggcggctgctgcgaaagtcaccgagactgaatttgctctcagcattgactcatgggctgatgcgcagttgtttaatgcggctgcaacctggattgaattcaccgaatctgacagcgactaccaagttggagaatacaacacgctcgacactcgaacactgaccaaatttcctacaaccgacaaagacggaattcgtcgagacaccgagcactttgactttcctgacggtcaatacactgacgaacccaacatcctcgtctggctgagcgctatcgacctggataaaggccacaactggagagtcaaggcctacgccaccaatatcacatcttcaggctttgacctcaacatcgacacgtgggctgacaccgtaatgttcagtgcgacagcatcttgggtggcatatccaaagggccatgagggtgttgcaaacggcagggtcagtagcagtgagctgcgggactggtatcctccctctgcccaggatagcaagaaggtcaagttctcttccaagactttcgatagagaaccaaaggtctttctcgcaataagcgagttggacttggactcctcaaccaaccttcgtgtcaaggttagcgctgacaagattgatgcgtcggggtttgtttggcgtgctgagtcgtggggggacagtagcatgtttaatgttggtgcagactggattgctttcggttag

SEQ ID NO: 150 - DNA, 1140 bp, Fusarium avenaceum
atgaacaaaatccgcggcaactgcagccctaaattcgaggaggttcgctcactcttagagcactacgtggaaagcggcgaggagcttggtgcttcgatcactatcaacattgatggcaaagaggtggtcgatatatggggtggctataaagacccaaaccgaacgcaaccgtgggaagagaacactatcgtcaatgtgttttcgtgtacaaagacagtgactagtctcgccgtcctcattcttgttgatcggggattgattgatgttaatgagcgagtctcacactactggcccgaatttggacagaatggcaagcaggatattcttgtccgacacatgctatctcacgcttctggcctttccggttgggaagaccccttgacaacggaagatctctatgatgtgaaaagaagcactgagatgctagcccgtcaagctccgtggtgggaacctggatcggcctctgggtaccatgctctgtgctttggccatctccttggagagcttgtccgtcgcgtttctggaaaatccttgcgtgactttgtggcagccgaaatctcagatactttggacgtcgactttcagatcggtgcttcggagacaacctgggacagaattgccccgatcgtgcctccggaattttcagggattacaccagaatttgaggctggatctgttcaagcaaagactttgctgaacccacctctggatcccaattctgttaacactgaaggttggaaaaatgcagacctgggttctgtgaacggacacagtaacgctcgggcgttgacacgcatcctctctgctatttctttgggagggtcgactagaggcacgcgcattctcaaggaagagaccattaaactcattttcgaagagtcacaacccgaggaagacttggttcttcgaataccgatcaagtttgggatcgggtttggcttgacgccttgtgtagcacttgactggcttccaggagggaatgtctgtttctggggcggctggggcggttcctttgttgtcatggatcttgacagacgtatgaccatttcttacactatgaataaaatgggaaatggtcttgtgagtagtgatagggctgaggcgtacggcaaggctatttatgctgcactcgaaagttaa

SEQ ID NO: 151 - DNA, 831 bp, Fusarium avenaceum
atgacgacctttaacccacgcgaacttggtgacgtgaaagtcaccgaccgctttaacctcagcaacaggaactatcttatcactggaggtggcggaggcattggcttcgcttgcgcaaaggccatagctcaacttggtggtagcattgccgtcattgatacagctcctgtgcccgtggaagagtttaagactcttagcgaacgttatggtgtcaagacgtcatacatttgtggtgatgtgaccagccaagaatctttggagaaagctttcgtggaatgtgttgagtctatgggcggccaactgcatggtgcgcttacggcagctggcattgttatggacacgccattgcttcaagcagattgggaggtcacccagcggacactaaatgtcaatatcatgggcacatactgggtgatcaagcttcttgcccaacatcttgtcgacaccaagacccctggaagtatagtcgccattgccagtattaacggccagggcatgtatgttcctgtgcaaccgaagtcagcctataacgctagtaaagctgccattaaaggccttatgggcccactggctggagagcttggccagtatggaatcagggttaactgcatctcaccaggcgcaatccaaactcctcttttggcacgtttgcaaggagaaaagcgagctattcttgactggtacgagaacggagcaccagtccaacgactaggcgtaccagaggacttaacacccatggtgtgctacctgctaagtgatgcctcttccttcacaacgggcgcagatatgctggttacaggtggtctccatgcaggaacagccttgaagtaa

SEQ ID NO: 152 - DNA, 996 bp, Fusarium avenaceum
atgacagacatggcagacaagcctcgcgtcattctaggccttttgacctttggtcccgaaggaacagaagctgatggaacccgcatcacttctttggacaaatttaacgaatgtctcgactacctgcaatcccgaggctacaaggaagtcgacacagcccgtacctacgtcggaggacggcaagaagcctggaccaaactcgccaactggtgtgaccgcaagctcactctggcaacaaagtggtatccttacaagcctggcgaccattccaaagctattgtcacgaagaatttgaacaggagtctgaccgagctgggatctgatagcgtggatattttttatcttcacgcacctgatcgttctgttccgtttcaggagactttggaggcatgcaatgagttgtacaaagagggcaagttcaagaagttgaggctgagcaactatgcagcctgggaggtcgctgaactctgtactattgcagaccagaaaggatgggtcaagccgagcctttatcaagccatgtacaactgcttgactcgcgccatcgaggaggagttggtcccttgttgccgcaagtttggtctggaaatcctcgtttataatccattggcaggcggtgtgctcagcggaagatataaaagcaaggacaccgcggacgatggcggtcgattttccagtgcgaacacaggattcggagccatgtatcgcgacagatatttcagggatgacaactttgaggctctgaaggtgatccagccggtcgctgacaggttgggcctgacgcttttggagattgccttccggtggctggttcaccacagcaagctcaaggtcaaggatggcaacgatggagtgataatgggagttagctccctgagtcagctcgaaagtaatttgaacaatctggaaaagggcccgttacccgatgaggtggtggaggtcctggaaaaggcatgggaaatcactaaacactcttctatcacgtactggaggtag

SEQ ID NO: 153 - DNA, 1143 bp, Fusarium avenaceum
atgaagggagaagcagttaccctaatttcaccgttttctatatccccacaatgtcgtcgtatcgacccaaccaagccgcgaaccgccttgttgaaacctgatggctcggataacaacaacgatcgcgtagatattggaacgactccactggcgttcaacacgaccaacatgcagctgtggagtgcacataatcccgctcgagcctgcttcgtcgcagccagcggatatgtagtgctgtgggactttcacggctgcgatcatctttccgcacatctgcctttgattaacgaagtacgaagtggcgcttcgttcttttactatgagaccggcccacgtacccaagaacacgccgcacgtttcgccgcatcagttgacgaactgctcttggaagtctgcgacggacaggtcgtcaccgagcacgcgcggatgatcaagggcccagatgagatccgggctgtgcgctgtgcggtcgcctcttgtgaagcagcggtcggtgagatgcgtcaagctatgcgtgccggtgccacagaaaatgatgtctgggctgctctacacagtggcaatattcgtcgcggtggcgaatggattgaaacccgcattctttgttctggaccgcagaccaacccttggctgcaggaatctggtccacggatactaagtgacggagacttggtgtgctttgacactgatctgattggcgtatatggtatttgcgtggacatgtcgcgtagctggatctgcggtgacctcgagcctactgcagaacaaaaacatttgtatcgtatcgcctacgaacatatcaccaccaacatcgagatgattaagcccggggtacgttttacggagctcacgcataacagtcatcgcctgcctgaaagatatcgcgctcaacgctattgcgttctatttcatggtgtaggcctgtgtgatgagtacccgtgcattcgttatcccgaagacttggaatcatatggctacgaaggagaactttttgcgggtatggtgctatctgtcgaagcctatgtcggtgaggtgggtggcaaggatggtatcaagctggagaaccagctgctcgtaaccgagacgggctatgaactactgactaagtacccatttgaagtaaagaatattatgatgggctaa

SEQ ID NO: 154 - DNA, 2943 bp, Serpula lacrymans
atggtgtactttcgcctgtgtaccatatctgatagcgctgcttcgtctgccaaagtgtcaggcacgacaatcggtgaagtacaaatcttgtttggtgacttattggctaggggtaatgagagcgacccagaaatatcgcttcagatccagtcgccaggccagtctttacaacaaggagaactaatgctcaaagtgttgcgtgtaaatgaaaagaagtcgatggctcatccaagcaaggaggaaggaatatccgaggtaaacagtggtatcacgattctggctacttggctgatcaggagctcagacaagtcattgtcacgcgtgacactggctgaggattcctggactcgctttgagaaaacaaatggcctcgaggatctcgacaaatctatcaattatggacgccaagctctggattcttgccctagacatcaccattacgatagggtcctggggaacctcgcgatagctctccaccatcgctttacacgacaaattgatataaaagatctcaacgaagctatcgtacactacaagcttttcctcgaaaaaaattctccagaacattgcaggtactcactggtgctagtaaacctcgccattgcccttcagactcgtttcgacgtacgaggcagtctaccagatctcaatttggccatcgagtattatgaaggtgttctaaagattcgtcctcttgggcatcgtggtcatgtggattcgctgctggatcttgcaacggctcttagcacacgcttcaaacgaagctctaacaaatcagatttggatcaagctatcgagcactatgataacgcactcaaattgtgtgtaccgggacataatcgtcaccctgctgctctcatggccttttccaattctcttttgagtcgatttgaagtggcaggagatatgcgagacgtagattttgctattttgcacctcaacagtattctggatctactcccgtcagaacatcccaatctccctagtgcgctgctgaacgtctctggagctctagtcgctcgctacaagaagcgcggtggtatacaagatgtggatcaggccattgatcacctgaagagagcagcactattgtatcctcccggacaccatagtctctccaatgtgcttatgagcacaggtaacgcacttttgattcgttctggaaagcaaggcgaccagcaaatcgtaaatcaagccatcgagtactactcaactgcagtaaagctccgccctcggggacaccctaacagatgtaatgccctttcgggtcttgcaactgcgtttcagtctcgttttgagttactaggtaacttccaagatttggatttagcaatcgagcatcatgagaactcggtagagttatatccacctggacacataaatcatccgagggctcttatgaatttagccaacgctctacaaagtcggttcgagcacctccggagtgtgcacgatctggatcaagccatcgtctaccatagtaatgcgctggaacttcgcccgctaggacatccaagtcgtttcaaggcactgatgaatttcgccactgctctggagtctcgattcgacctgcggggtgacattcgagatcttgatagagccatagagtattatgaatacgtagttgagtcctatttcgcagagaatcccaatcgtcccaaggctctactgaaccttggcagtgcacgcgtaactcgcttcaagaaactgcgcgatgagggggatctcactccctttgactacattaagtccgcatcaactcatccttccgcgggctcccacaagcagctaacctcttttcaagagatacgtcaacttgagggctacgttcatttccttatgccaactccttttgacgaattaaaaaaggcagctgacaaaggtccaatcattatcgtaaacattagccggtatcgttgcgatgccatcgtcgtgctcggctccgggaagcctcatgttgttcccctcgttcaaatcactctcgaagatgtttcccaattgtcacaagagtttggcgcagcgctgaagatgtccacagctgctggcgaggagaagataagagaaaaccaaatcatacgtgtgttgcgacaattgtgggatctcattgtgtatcctatcgtcaacaaactcaaagccttggaggccgatgtcccactaggttcgcgtatctggtggtgcccgacttcaaagcttgcttcacttccacttcatgcagcaggaccatatcgtatgggtgaacagaatttgcctcacctcttcgtttcttcatacactccaacattatcggcactcattcggtcgaagaaggacaagtcaactgtttccgagtcgaaacgtgcctttttggcagttggacaatcaaacccctacgggactagctgcgagagtgatctccagtcagtgagtgttgagctcgaagctgtccgccgcaaggtcgtatcatcgcctatgcaagcgcgctactcacagctaatcggagacgaagccactgctggagctgtaatgaatgcatttcgcaagcatgggtggatccatctcgcatcacatgggaagcaagacatgttgcaacctttcgagtctaattttgctcttcgtgataaacctcttcgccttctggatatcatacacgccgaactggagcacccagaattcgcatttttgtctgcgtgtcacactgccgtgggtgacaaggatacacccgatgaggttatccatcttgccgctggcgtgcagttctcagggtttcgaagcgttattggaacaatgtgggcagtagatgacaagactgtgccccatgtggtgtccgagttttataatcatcttataggtagtaatgtcgattgcactaacgctgcgctagcattgcacaaggctgcaaaaaccgttcggaagtttcaggttccgctagaccaaaggatcgtcttcatccatattggagcttaa

SEQ ID NO: 155 - DNA, 7203 bp, Serpula lacrymans
atgtcatccggacttcagagctcgcagaaacaacccatagccattgtcggtatcgccgccgacctccccagcggagactatgcaccaactaatttggactacaagaaattcatggaattcctattgaataaaggagaagcatacgaagaaattcctaaagaacgctttaacgttaaatcatgggcgggagagactctcggtcgagtaattgctacgcgtggcgctttcctcaaggaagtaggatcgtttgatcacgtcgaattcggtatatcaggaaaagatgcccgggccatggcaccgagtatccgtaaacttgtcgagttatcatttttggccttgcttgatgcgggcattgagtatcggggtcgtgatgtcggctgttacgctgctggcacagctttcgacatcttaagtatcacagaaccggatgagttcgaggccaagggttctttcgctggaacaccctctatgatggccaacaaaatatcgtatcaccttgacttgcaaggaccttccgtcccaatggacactgcctgcagttcaagtttgactgccttacatcttgctgtccaggcaattcgagctggagagtgtgaatccgctgttgttgctggatgccagcttaatttgagattggctgattttatccagtacagtcaagcttctgtgcttgctcgggatggcaagtgcaaaccttttgacgccggagctgatggtttctcgcgaggtgaaggtgccgttgtagttgtcctcaagccatacgaagatgctatcagggatggtgactacatctatggcaatatccttgggtcgggaattaactcttgcggaggtgttgctccggtttacgctcctgtcggtgacgcacaagccgaggctatgcgcaaggcttacctgggtatcgaccgcaacccaagagaagtcgatttcgttgaaatgcatgcaactggtacttcggccggagatccagtggagagtgaatggattggtcaatattttaacagggaagaggaattaatgatcggtagtgtgaagggtaacatcggtcatttggaaattacagctttccttgcatctttatgtaaagtgtgcgccattctggagacgggagtggtgcctcctaatgtcaaccttacgaaacgtaatcccgccatcaaatggggccaatacaaattccaagttcctcttgaagccacaccaattaagccgcgttctgcatccggaaagctgttggtttccatgtcgagcttcggtattggtggtgccaatggtcacgtcgttgtcgagagtccatcgcctttgggcgaaccacaggttgttggtcaagttgcgactggccctgttctacttgtggcagctggcttgtcgcctagatccacaactgccatcgctgactccttgggtggtgttgtcaacagtcagcccgagaatctggcggcggtttctgccatttatggtcgtcgagccaggcagatgacatggcggtcctttgctattgctcgcccagggcagcaagctcaagctttacaattcccagcaccagctttatccccccgtattaagccacctatggtcttcttgttctctggccagggtcctcaacatattaacatgggtcgtcagctatttaagaaatttccagtgttccgtgatacaatcatggaactggacgcttgccatcgcgaaatgactggtcactctttgagcgagttggtcggattatttgaagatgtcacacccattgaaactctgccctccatatggccaatttctgttattctcccttcgctcgccatggttcagatggcgcttttcgacttgctagttagctttggccttcgcccggacatggttattggccactccgctggtgagactaccttgttatacgcatcaggagcaggctcgaaggtaatggcgatggagattgccattgctcgcggaaaggctatgactctcgttgagaaagctaatgggacaatggctgctctcacttgcactcctgcacaagcacaagccatcatccacgctgtcactcgtatggatgctaagaagggtatcctcgaaatcgcgtgctataacgctcatgaagctgtcgccattgcaggtcacacctatttggtagagaaagcagtagagttggcaggaacaagaggtattcttgcccgtaaaattcagacgggtgttgctgtccattccagcctcatggaggtttgtgagaattattaccgttcgttggtctcggaagtgtatgccagacaccctggtgcgcacacgcctgtagtgccgacttactctactgctacgggtgatctgaaaacggacgaattcaccgaggaatacttctggcagaacagcaggaatgcagttctcttcactcaagccattggttccatcctcaagactcaccccaacgcttgtttcgtggaagtcagccctcacccagtgttgtccacctacttgcaggaacttggtgttcctatggggtctgtagtgtgccccatgcgccgctccaagaaattggaggaattccacgaagaatccaagctcctggaagcacttggacagcttgtcgtcatgggtcacaattctgtcaatttctgtattctcaactcgcagaaggttatatcgcattccctcactattccaccatacccattcgcgaagaagttcgtgccttacctttctgagcattcccgtgtcgcgcagaagcaatttggcgttcgtaacggcccattgaaccatgtagatctgcgcatcaataagctcacacaccctgaaattgcacaacatcttataaacgatgaacctatcatgcctgctgcaggatatctagaaatggctttggaggctggtgctaaggtgctctggaatgtgaagttccatacaatcctgtctatgtctgcggaaagccctgtaccagtcgaggtggagatagaccgtatgcactgggccgtgaaatctcgtggcggttctgcaaatcttatggagggtaccactgttgcatcgcgtctgcacgccgatggattcatgtccaaggtcccagtggataatctggataatcttaatattgaggctattcgcagtcggtgccagccgcgtagcatggagaatttctatgatgctctaaagcatttcgctcaatatggtcccgttttccgtcgtatcacagagttcaatatgggcatagatgaagccgtattgactattcggggaggggctgctgatctacctggatttgataactttgtcattcatcctgctatccttgacgcatgcattcatgtggtagtgcatccttccttcacgaggaatccggatcacaaggtttactaccttccggctcgggtggagactttcatggtgcatgagcgcctctcccaaggtactttccctggaacagtgtatgcacatgctgtattgagagagtggcgaccttctgaattggtaaccgatgtcactgtggtcgactctactggaaccagactatgtaccatgagtgggctggtcgttgagcgtcattacaacactcttcctcgtaccattagcaaacgattcaacgttgcatatcaaccatttggcatctctccacgtatgcgcgtgcccaaagagcactcggttccccatggtgcagatccagaggacgcattgttccgaattgctcgtgctgcgttgaaccatctgactggtgtgtgtggaaagaaaactattcgtattttggctttggattacggttctggcgaactgaaccgccagctttgctcttcgtttgaaaagattgtccaatcaggttctagcgtcgcctatttcgttagcatgaaagattccgcatctttggcacagcaggctctgccgcgcttttgcagaccggtgtctttggatttctcagaaccgttggataagcaaggcctcccgcaagcctccttcgatgctgttatcagccttcaggcattaggatcacgtgattctcttgaccaagaccttcatcagctaaactctttacttcttcctggaggattcttgctactcgctgaacctgctcaacgatcatcgaatactccttctagtagcctgcatacctgcagtgaatggctttcactcttcagttctttgggaatgcgtactactacccactgcgtgaaggctgatacctcgcccttcgttgtcctggaaggccagcgtcaatcaatctcttttgctccctcctcgggcgcaccgaaggaagatatattgttcatatcatatgctgttggccgcgaaatggagattcagcgcatactgaagggcctggacattgacaatccagcgaaggtttggttcactgctacggatcccatggatgccgatggtggaagagggttcacgcgttcagttcggcgtgagttcccactgtgggatatcggctttgctatcttcggcttccagtgtcctcgagctgagcagaccaacattatcaatcgtcttctagcaacacctggtatggaacgggaagtttatgtcgatgaggagtatcaagtatttgtccctcgcttccatgaaggtcctactgtgtctcctggtaccaagatcgaacacggtgattcgaccgaattatcaccatccgatgtgcaggtcactgttgtcgcttcgtctccctcagatgctgggttctatggcgttgttgggcgtgtgacgaatgttggtgatgaatcagacgcatctttggtcgactccttgataactaccgtcgtgaagagcgcaccgacaaagcacctgagggtgcacaggggtgctgtaacacctgtcccggatgaacttgatgcgcaagtcgtggcatctgtcatcccagttttattgatcggtggtttggctattggcgcaggagctcttcgggatccatcgcgcatgaaatcgggtcgtatcgttgttactcacagtgacacggccactggtcaggcactcgcctggttcctgcatactttgggtctccaacccattggtgtaggctccaaagcttcgccgtttgaactttcgaagctcgctctccgcaacggggacctggttttgtctggctacagtcacgacaatcaacttttgacaagcttcgttgccgagggaactcgtgtgttctcttgggccacaagcataaatctcgcacacactctttccagcgacccttggcttgttggcgatactttgcaggctgcagttgacatatcctcggaattcgagctgcctaatgtaaaagtgctcagtgggcctagtaccgaatcatcttctgcgagctccaagttattcaaggctgatgaggcatatctgctggtaggaggtgttggaagtttgggtatgcacattgctctgtggatgtacgaaaaaggcgctcggcacatcgtcttgacatctcgatccggccgccagtccttagaacgcgcaaatgatattttagccatgcgaatgctcagttaccttgagaccagaccagacctagacctcaaaatagaggcttcagacgctacctctttagaagcattgcagaagacgctcgcgggtgttacgcgtcctatagctggttgcatgcttttacccgcaatcttaattgacagagggttcttctcgcaggatgcttcgagcttcaagaccgtcttcgactcaaaactgcgtgtgttcgagacagtggaggctggtcttgatattgcgaagttggacttcttggttacgttctcgtctgtcgtaacctttggtaatgcaggccagaccaattatgcaagtgcgaatacggtggtggaaggcaagacagcacaatacaggaatgccttttctatcatcaccccggccattaccgacactatcgctatggtcggcagagctgatctcgacttccaagtacatggacggcacttattggcctggtcctactctgctagagagctttgcaactgcattgaggatggacttttcaagcttcaggatgaacccttcaaactttatgttccagaccttgactgggagcttgtcgaaaagcatctaggaccttctccgctctacgagcatttaattccacgatctgcctctgtgcaatctgcgccgtccggagaaagcgctgctgatgcacttcgtaacgttgttttacagttccttgatgtggacccagccgacttctctgttgatgtccccttcacttcatatgggattgactctctgtccgctggtagactgtcctacgctttacgaccattcatcacgatttcacaaattcaactccttggtgacatcagtcttgctgacgtcgaacgccgtattgaagccgagtctcagactgaggatatctctaaccccggctctgcacatgatgtccagaaggatggtggctctggagtgcaacaaccggtagtgaagatagcagattacgaaggtgatacgccattgatccttctccacggtgccagcggcagcattctccccttcatgtctatgaagcagaacttcaggacctcgttgtgggctcttcagactactccagaaacgcctgtgcattcgattagagccattggtcagtactactacgaacacattaaggcagctcggccgcatggaccataccgtcttgctggtttctgcgggacttccactattatctttatggtcgcgcgtatcatgcaggataatgcagacgaagttgttcagctggctattcttgatcacttccctctcttgtgggcctcacccctcgttaagcctgacgaagagagcatcaacttgcgcacatctggtcccgctgtcctgaagcgaactatggacactatgctgcaattgtatagaatcgacggcgcgccctcacgtgttcgtaccgctgaggactttgataaattgatggatggtcacgaggtttctcctcaagttcgcggttggatggataccataaccagtcttcttgccgccacttacgaattcatgttcgagttgctccctgccgacgaaccttactcggtcgacgcattgcgagaagcatttgcaggctggttgagagagctgcgtgtacctatcaccatgtacatggcatcggggggttatattgcattgattcctgaggaagagaaacaaggctgggagcagtactcgattcattcggtgtatcctgatgccaaagtcatgggattcgaatgcagccatttccaaatcttagacttgccagagcttgcagaggaagtccaacgtggctggtga

SEQ ID NO: 156 - DNA, 1272 bp, Serpula lacrymans
atgtcttccgaatcctcctcacctgcctttggtcacgccatgcgctcgtacttcgggtttgattcagactacattaacctgaatcacggtgcctttggagctgtgcccaaaccggtagtcgaagcagctcatgctctaaccaatcgagtcgagtccaacccagactacttcatgaggctagaatacgagttactcttggacgaagggcgagcacgtctggcacaactcgtcggtgcagatgtggacgaatgcgtgcttgtcccgaacgtaagcaacggtatcaatacagtactacgaaacttcgaatgggccgagggcgacatattggtgtctgccagcaccactttcgactctattgcccgagcggttgaaaatatcactggggcacgtccacaagtcccacaccctggcgtctccaagttcatcctagacttccctcagtcgcatgctactatcctagcttcgttccgcgaacaccttcgtgccgtgaagtcacaggctccgaacaatacgattgtggctctcattgacactattgtgtctcagccagctatcttaatgccttggaaacagatggtcaagatttgcaaagaagagggggtttggagcgtgattgatggtgcacactcacttggccaggagctcaatattggtttaagtgaagctgaccccgatttctgggtcggaagttgtagcaaatggatgtacactaagcgtggatgcacccttctctacgttccaaagcgcaatcaacacatcatcaaaaccacgcttccgactgcgcacagtgtcctggccgcttcagaagataagccccccaccgccttcgtgatggaatttatatattttggaaccgtggaggctattcccttcctcagtatcaaagcagcattggacttcagggattccataggcggagaagaaacaatcaatgcttactgccactcgcttgccaaagcaggcggaaggcgtctcgccgaggtcatggggacatctatgatggtaacagacaatgaggacgaactgattgccaacatggtaaacgtggaacttccttttcccgcaactattgcctcgaccaaggcagtattccgcgttttccaaaacagacttttacaagaccacaagatgtacgctggccatttcttccacaacggaaagtggtggacgagggcctgcgctcagatttacaatgagatcggagatttcgaaaagcttggatatgcgctcgtcgctatatgtaatgagatcaaagaagccgaggctcggtaa

SEQ ID NO: 157 - DNA, 1521 bp, Serpula lacrymans
atggctcctaatcgaaacagtattcgcactagtcttcgaaacagcatcgcaattgacctttcgtcggtgggccatggtgacaatgcgctactcgacgggggaaaagtaggaggggatgaggaacccgcactcattgtttcgactggcaggcccaatcgtaacagtgtacacaccatcgacttggctgcaatgtcggagatggtgcacggcgtgaagggttctgaccatggcggattaaagtcattacctatcgaagaggagcagaaagtttacgttgcaccacagccggttatggatttccctgaaggtggttggagagcatgggcaacagtggctggatcattcttgttcaatttttgtggttttggttatacaatgtcgtttggcgtgtaccaggcttattatgtcgaacattatatcacaaaccagtcgacttctacaatctcgtggatcgggagcgtgaattcatttttgatgatctctggcggtgtaatagttgggaggttgtttgacaaaggatatttctatcatctcattactattggttcactattatattgtttttcgctttttatgttgtctctagctcaacctgataatttctatcaaatattcctcacccaaggattaggaatgggcataggagcaggtatcatctatgtccccacggtcgccgttgtatctcattacttcctgcgataccgagtgattgcgatgaccattgctgtatcaggaacttcacttggcgccgtcatccatcccattatgatgaataaactactcaacagtaatatgtcatttggaaatgctgtgcggataagtgctggcatggtcacaggcttgctcatcatcgcttctatgcttatgcgcacgcgacttccgcctccaaaacgcctcattcctttgggtgaagcagttaagaaattttctcgtgatagagcatatgtgttcgcggctttggggttgctggtcttcaccatggctttctactacccgctcttttatattcaactagatgcaacggcccatggtctcagtcaaacgaactcgttctattcgctcgtcattttgaatgcctcgagtttctttgggcggatccttcctggcttctttgcccagaccctcggtgttcacaacatgattactgtggctgacatggggtgcactgttttgatcttcgggatgatcgggcttcgcaacctgggaggctttatcgccgtcgagatcttctacggattctttgcaggaacatttgtaggtctgatgggaccattgatggctttgttaagtgatgatgtctcagaactgggggctcgcatgggtatcggtttcttgttctccggtctgggtggtttgattggtacacctatctctggtgctttgctctctactcaggatatctggtggaagcctgcactcttcagcggagttatgggagccggtggattggccatgttcgtcctgatgcgcgtcgaactttaccgcagaacagccaaaaaacagaacactgtggcagcctga

SEQ ID NO: 158 - DNA, 7242 bp, Coniothyrium sporulosum
atgacttctagatcaagcctttcctcagaaagctatgacaatgtagctacatcgagtatttccgagaaatgctctagtgacgaaggtgttgcggatgtgacgtccagacagagaacacaggtacccgttgcgattgtgggtatgggatgtcgtttgccaggacacagcacctccccaacagcattatgggatttgttggaaagaggcggcgtagccaaaaacgaaccaccaccatcaagatttagtttggccggccattacgacaaagccaacccaggaagacccagaactatgaagtctcccggtggcatgttcatcgaagacgtcgatcccgctttgttcgatggccaattcttcaacatcagcagaacagaatgcattgctatggacccacagcaaagacagatgctggaggtggcgtacgaatgtttggaaaacagcggtacgcccattgagacgctgagcggtactaacactggtgtgattgtgggcaccaacttcatagattatggtgccatccaggcaagagatccagaaaacagagcagaatcagtcatgatcggtttggcacccgccttgttgagcaacagaatctctcacttcttgaacgtaaacggtcccagcatgaccgtcgacaccgcctgctccgccggcctcgtctctttggacgtagcttgtagatatctggacagcttccagaccgacgccgtcttggtcggcggcgcaaacttgtggttgtcccctgagcacaacgaggagatcggcatgatgcacgtgacgcagtccggctcgggtttgtcgaagagcttcgacgcgtctgcggatggttatgtcaaggcggaggcggtgaattgcttctttttaaagaggcttgatgacgcggtaaggaatggtgatccaattagaggtattcttagaggtacggcggtgaatgcgtcgggtaggacgaacggtattgcgaatcctagctcagacatgcaagcagcagttactaggcaggcactgaagaatgcgggtatcaaggaggaggagttttacaagacaagatttcttgaagcccatggcacgggtacgttggcgggtgacccaatcgaggccaggggcgcggcggctgtgttcagcaagagcagagaagctaacgaggagttgatcatcggttcgatcaagagtaacattggtcactcggagcctgcagccggactgtcgggtttgttgaaagccactatggcggtggagaagggcatcatcccaggtacaccaaccttcttcaaaccaaacccaaacatcgactggaaaggcctgcgtataaaagccagcagaatgtccatgccctggccaaaggtagacgcagacaatatcagacgtgcaggcgtgaattcctttggatacggaggtgccaacgcacacgccgtggtcgagaacgatgctcaaggactttccagacacgtatcctcatacaagcaagtgacgactgacttctttgacgatgatgacgacgagtttgacgaggatcaggaagatggcacccaagccactccaactctgttgttcttctcggcaaacgaccagtcttcactggacgagtacatcaagaggttcagctcgcacttgcagaacccactggtgtcgcttgatttgggagatctagcgtataccttgtctgagagaagaagtagacactaccagggcgcggtggctatcacgcgtgctaacctgcagcacatcaacacggacaccctgatcagaggcaagagaacgtcgaccgcgcctagagttgcctttgtgttcactggtcagggcgcccagtggccaaccatgggagctgatcttatcagggactttcccctagccaggagcacggtggagtaccttgacagcgtgttgcagagtttacccagtccaccatcctggtcgttggtggacgagctgaccgccaaaagaagcgtcgaggccctgagacagcctgagttctcgcagcccttagtcacagcgctgcagattgcgcttttgagagtgctggaagactggggtatctcacccgaggccgttgtcggccactcctctggagaaatcgcggcggcatacgctgcgggtttgctgagcgactccgacgctattaaggtggcctactaccgtggtcagtcgtctaaaaagacggaatcaggtgaggccgtgggtatgttggctgttggcattgatgaggcggcgttggcgggttatcttgaggcaaaggcgaacaagatccagattgcgtgttacaacagcccaagcagtctgacgctatccggcttggtatccgagttggaggagctgagagacagaatccaggccgacggtcacttcgctaggctgcttttggtcgacttggcataccactctgactacatgtccgagcttgctgaggtgtatgaaggcatgctgcacgaggacggtttgttccagaaggcagccacgcccagacctaagacaagaaagcccgttgccatgttcagctccgtgaccagcgcggttgtcgacccagatatcaagttggacgccgcgtactggaagaagaacatggtgtcgcccgtgagattctcgtctgccacggcgcagctgttgaagcagaccagcgctgacttcttgatcgaattaggccccagcaatgccttggcgggcccaatcgctcagatcaagaagggcttggacaaagacggacagtatacctctgcgttgaagagaggtgccgattccacaatgcccatgtacgaggcggccgcgaaactgttcctggcaggagatcagcaggtcagtcttgcaaaggtgaatagagtaagcccacagacgtcgaaggtcattgtcgatctgccaaactatgtgtggaaccactcgacgagatattggcacgagacgcgtgcgagtaaggagtggagatttaagaaattcattaaccatgacttgttgggctcgaagatcagctcggtgggatggaacgcgcctatcttcaaagccaacatcaagctggcgcatttgccatggttgagggatcacaggttgggcactgacgttgtgttcccagccaccgcttatatcgcaatggctgtggaagccatgtaccaaacagccatggttaccaaatggaaccagaaggagcctgaaagatacagattcaaacttagagacgtgaagcttttgagagctctagtcttgaccgaggacagggaaaccaccatctcactgtcgttgacgcccgtcagaggttcgaccggatcatggtacgagtaccaaatgtgctccgagcaagatggtttggacgtagacgtcgttcacagcagcggtatggttagcgtggaaaccgactacaaagactttaccaaaactgtggagccattggagttggctacaagcgcgaagcagtggtacaagaccatggccgaaatgggatacaattttggaccatcctttcagaaacatgtgtcggttgagtcgacgatgggacagcgtcagagcaggtcgcttattagtttggaggctcctccatcgcagcccgagggtcagtcgtggtacccacttcatccaggtgtgttggatggttgcttccaagctacaacgccatcgttgtggaagggccagctgcctcaggcgggtgacccagcgttggtgcctaaggctattgagagcatgatcattgaatccggaagtgcgcgtaagttgagagctgcgagcgagggcattgcctacgcgtctgcacactacctgggtgccggagacgccggtaatgcgagaaactacagcaccagcgtcgatctgtacgaccccaaggatggcgcactgttgttccaactaaagggcctggcttgggcggagatggaaacgagcgacgaggagaaagtgccccaccagttcatgcatgtgaactgggacgctgacatcgacatgttgatagaaggtgagccaactctgagcacgacctggttagactccaggactgtgcagcaagtcattgatctggtggcgcacaagagcccagaattgagagtcctggaggtcaatctgagcaccctggatggctccaatttgtggctggagcagggcaaggatggtactgacaacccagtcagagcgggctgctcgcagtaccactttgccgtcagagatcctaagacgttaatccaggcccaggaaagattcagctcgagagcgatcacgccacagtttcatctattgatggatgtcaccaagcctgcaacgattactggagcggacagtattgatttggcgatcattaacccaagccaagacgaattggttgacgtggatggttttattcagggtctggctccacttgtccgtgagggaggattgatcgtatcgaacggtttcagaggcatcgactcgctgggaaagacgatccatctgagcaacggtgtgagcatctgtcgtgtgactaggggtgccgtcttaatcgacggtgaaacagaaattccccaaaggagcgtgactagagtcagccttctggacaatgctactcaaggctccatctcggaggaggtggcgaaagtatgcgaggacctagccacacaaaaatggcaccttgagaacgcttccaacccctttgaagacatcacctccaacaccggcatcgtagtcgtattagacgaattgttctcctccgtcatgcagaccatcgacgcaaagcagtgggagcttttgcagcaccttgcgaaagtacaaagacccttattgtgggtaacgagcagaagcgccgaccccacgcgtgctgctgctgtcggatttctggctaccatcagagctgaggagcaagtgccattcttcacgttggatgtcgaagccagtactagcagaacgtctatcgatgcgttgtcggcatgtcttggtagagtctgggacatgacgtcctcaaagacgttcgacccaagagcaagcactgattacgatttcgtggagcgtggaggcattgtgttggtcagcagagtgtatagagacagtgcgttgactttcggtcagagcaccagccccgctgacagaaagactgaggtcatgaacctgagaaaaagtgatagtttgatcagatcgagagctgagaaagtgggcaatcttgattccgtgcactttggcgaggtggatgcagagtcttctgctttgcccgagggtatggtggaagttgaaatccatgcggctggtatcagctacaaggatgtagtcgtcactttgggttccgctcctggcgatgataccgctcttggccacgaagccgcaggcgtagtcaccaaggtggcccagggtgtatccaggctgtcagttggagatagagtggttgtttttgacaaaggctgcttcgcaaatagaattcacaccagtcccgctagagtccatagaattcccgattccatggacttcgaaaaggcagcgacgatcccaaccgcctttatcactgctatacactccttgctagaccatgccagcttgtcagctggtaagagcgtcttgatccattctgccgctggtggcgtaggtattgccgctatccagatagctcagtacgtcggtgcagaagtgtacaccactgttggcacgaacgagaagagagagttcttgaagtccacgttcggcctggccgataacagaatcttcaattcgagaagcaccgagtttggcgaccagatcctgtccgcgaccgatggcagaggcgtggacgtcattttgaattccctgactggagacacgctggacgagtcattcagagtccttgctgacggaggtatgatggtggagcttggcaggagagatgttttggacaggaacagcctgcctttggctccattcgacagaaacagttcgttcagagccattgatctatccacgggtaaggcgaacgattcgctggtggcccagttgatgtcgaagctgtttgaattggtcgaaggaggtgccatcaagcccatcacaccagtccataagtttgcgtggacagatattccaactgccttgcagttcttgcgacctggaacccacatcggaaaggtggtgctgacacaagacaatgaggtccacgttccagttagaagagcgccaaagagtttgggtttgagagcggatggctgctatttgattgtcagcagtttgcgtggtttgtgcggaggtcttggcatctatttggctcagcaaggcgcaaagcatttggctgtcatgtcgcgtagcggttacgcggacgagaaatccaggctggttatcaagcagttgaaagcgttgggctgccacatcgatttgttgattgcagatgtgacggatgcagaggctgttacgaaggctatgcagcagacaaccgtccccatagtcggcatcatccagggtgccatggttctaagggatagaccctttgagtccatgacattgaccgagtaccacgaagccctgcaatgcaagatcagaggaacctggaacctgcacaacgcagccgagtccttgggcctgaagttggactccttcaccatgttgtcgtctctttccggtatcatcggtcacgtcgcccaagccaactacgctgccggcaacgtcttcttggacgcgttcgcggcctggcgtcaagcccgtggtctgcccgcctgctcaatcgacctgggtatcagcgaagatgccggcgtcatcgcggagagcgccaagttgcagagctcaacagagaaaggcatgttcagaagcctgaacgaaggtcaactgagaaagatcttgtactttgctatgctgcagcagcaagagacgccatcggcaagcgatgttggcgctgtcagagagttggcatttggccccatggtgacgggcctgacgttcccacagcccgacgactcagctttgaagggcgatgcgagattctccccattgttcaccagcaatgagagatccaaggatttgaagtctagcggcgagaacgccaacgcggacatccaggcgttgtttttgttgctgagaaccgagtctgcggatcccgcgtcgagactgaaggccctgatcgatgtgatcaacggatgcttcatgagaatcctgagacttgatgagccaatggatccagaacgaccgatcagtgtctatggtacagactcgctggcggctgtcgaggtgagaaactgggtgaggacggagttgggctgtctggtgacgacgttggatatcatgactgccacgtctttgacgtccttctgcgagaagattttgacgaagttgttggctgcggagacggccggctga

SEQ ID NO: 159 - DNA, 948 bp, Coniothyrium sporulosum
atgggttccatgcagaacatgcccgtcaaggaggatgtcgaattcaaaacgcttgacggtttgactcttagaggatggttgttcgcgggccctccaaaaggccctgccatcatcatgaccccaggattcaaccttaccaaggatatgattattttcgaagctggacagtatctgaaccaggcgggtttcaccgtcttgggatatgatcctaggtgtattggaacgagcgacggcatgccaagaaacgacacccaacctatgaagaacatggaggactaccacgacgccttgacctacttgaaggtgcataggcgagatctggttgaccctgagagaatcgcattctggggctactccttcagcggtgcgatcgccttgtgtgccgctgcccttgacaaacgtgccaaagccgtaatagcctgcgcagccaccacgacttgggagttctcgaaatggaagcaagtcctggccaaggcgatgaaagacagagagtcgcaattggctggaaaccagggcatgtatttgccactgttgaccgagactggcgaccaacccgcaggtctgggccagggctaccaaggcgaggatgtcttgggcatcattcagagacatgcgtctatcgagccaagcttcatcccaagaacgactctgcagacgtactacaacattgcggcgttcagacccatggcgttgatgcaatttgtggatcctacccccgctttgttgatgacaggagaaaatgatgagatttcgccaccagagctgcagagaaagttgatctacgatgccatcacgggacctaaggagtttgtgacgatcaaggataggaaacatatggatattttgacgggcaacggttccttggaggtttttgagaagcaggccgagttcttgaatcgtgtcatggttccaacgaagggcgccaacggtgtcaagaaaaggagctga

SEQ ID NO: 160 - DNA, 1569 bp, Coniothyrium sporulosum
atggccttgccaacatcaggtgctgccaccttgtcagaagctgtgcttgcgttggttgcgctatacactttgtgtgttgtcgtgtatagactgtactttagccctctttcaaaattccccggaccaaaacttgcagccgccacaagttggtattcaaagtacttcgaccttgtcgctaagagacatggtggccagtttccaatggagatcaagagaatgcacgaggagtatggtccaatcgtgagaatcgccccagacgagcttcacatcgacgacccagaatactggcaggaagtttactgcaacaatagcgcaaccaggcctatagacaagcaagaaaagctacagcaccgtttcggccttcctgatgccatcttcagtactccccaggcggaactgcacagatcaagaaggcaagcaatggctggtttcttctctagacagagattaagagaaactcagggcagagtcaatcaattgctggagagagtctcgcaacgtgtctccaaagaatatgctggttccaatcgtgttttggacgtcggcgaaatgttttcggccctggcggttgacatagtcacggaagtgtgctttcgtagatgcaccaactgtactgaggcacctgaattcaaggcaccacttgtggtcaccatcataaacaacatttggctgagccactggaatgcgcatttcaggtttctactagcttggattgagctgttgccaaacagcttcatcggtattcttgtacctgccatcaagccaatcctggatcttagagtcagcatcaacagacaggtcgcagagatactttcgggaatgaacaaggcttccgtcggtacgaaggactttagagactcagaccatgataccatctttgacgaaatgttggcatccaagcttccaaccaatgagttgtcgtttgacagactgtcgcaagaggcgatggccttgaccactgcgggtgtggagacagtgaaggcgaccattaccttcgctattttccattgtctagagaagcctgctattgaggcccgtttgaaggcagagctgacagaggccatacccgatgcttccatcattccaacatgggtcgagcttgagaagcttccctatttgactgctgtcatcaatgagagtctaagattgagctatggtacgacccaacgtagcccaaggatcaacagactgcacgccatgcaatacagacaatgggttatcccacctggcacagcagtcggtatggactctttccatatgcacaccaatgcggaagtgttcccagagccccttgtttttcgtccagagagatggctaggtaatccaaaaggtcccaacggtcgtcaacctctgaccaactacttgaccacttttggtgctggctctaggatatgtgttgcgatgcatctggcttacatggaggtctatgtgggtttggctgtcatgatgcgtcgtcatgacttccatctgtttgaaaccgatagatctgatgtggagttcgctctggacatggtggcgccaatgccacacagagaaagcagaggtgtcagagtcacggtcagcaagtaa

SEQ ID NO: 161 - DNA, 750 bp, Coniothyrium sporulosum
atggctccttcgaccgtagttttgatcactggcgccggcagaggcattggtaaggcactaacagccgcctatttgtcgtatccagatcatgttgtcatagcgaccgttcgcgatcctaaggctccaaaagctcaggaattgaagggcttatccgtgggaagcggctcgagattactggtcgtcggcatcgagaacacaaaccctgaggacccaaagcaggccgtcgaaaccattgaggctgctggagtcgatcatatcgatgttgtcatcgccaattctggcatctccattggcgccgctcctttggaattggccgaccccaaagccttcaccgagagcttcaacgtcaatgtcttgtcaggcgttgtgctgtaccaggcagtgagcaaactgttgacaaattcaagcgccccaaagtggatctccgtctcaagtagaggcggttccacctctgctccactgccttggtacccatacgcggctgcgtactgtatgtcgaaggctgcacaaaactggttcacacaaaccttgcatgttgcaaacgcatctcttactgcttttgcaatccacccaggattcgttctgacagatatgggaattgcggctgctactggcgctggcatcgcattgcccgagacttcgggcgatgagagtgccggcaagatcatcgaggtgatcaaatcggcaacgagagagaatacttcgggcaaattcttggacgtcgacacccgtgaagagatcccctggtga

SEQ ID NO: 162 - DNA, 1518 bp, Coniothyrium sporulosum
atggttgttgcaacttttggaactttgagtctagtacttagcggtataacactggcaactaagagtcctctacatgcaagagacgacgcatgtgcagctctagctactgtattgccacaagatgttgccctgccaagcaccacagctttcactcaatcgagctcttactggtcacaacagcagttggaaacccaaccacagtgctttgtgacccccaagagtaccaaagacgtgtcgaccataatggaagtcttgacaaaaggaaattttccattcacggtgaagggtggcggccatattccattcgccggtggttccagtatcgaaaatggtgtgacgatcgacatggtgcacttgaacgacatcaaggtttcttctgatcaacagactgtatccatcggtccaggaaacagatggattaatgttactgagactttggatccccttggcctttccgtcgtgggaggtagagacatgaatgttggcgtcagtggattgttgcttggtggtggaatctcgtacttttcgggacagtacggatgggcttgcgataacgtacgtcgttacgaagtcgtaatcgcgtcaggccgtgttgtctatgcgtccccaagcgaaaacaaagacctgtactgggccttgagaggaggtggtggcttgaacttcggtattgtgacgaggttcgaaattgtcgccttcaagcaaggtaaaatctgggagaacgccttgagcttccctggcagttcaaatgcgacggtcatcaatgctttccaaaaccttacagctcgtggtttccctgcggataaagccgcgtctggcttcgttggcataaactatcatggctccaccggtggatactcaaccgacgtaggccttctacacgccacagtaccttccactggagagggtttacctgcagttttcagaccattccaaagaatcccatcggcaactgccaactccaccgtcacagctgatgtctcaacctttttgaaaaatttcgctacgccatatggccgtagatggacatggggcaatgtcgtcgtctctgcttctttctcaaacaagtttcttgccgaaatcttgtctttgtatgaaactagaaatgttggcctgttcaaaacgcagggagaagatgacattacccctactgcacttttccagcctattccattgaacgttctggaagcaatgcaaaagaatggcggaaacgcaatgggactgaagccttcgaacggaccattggtcttgatatcttttcccatgtcctgggcaaatccacagaatgatgatttggcctatggcgccacgcgtaaattgatcgccgacgtcgaagaaaaggctaagaagtacaaggtatacacgccattcgtgtatttgaattacgcggacgccaagcaggaggtgcagaagggctacggtaaggagaactatgagagattgcagaagattgcaagaaaatacgatccacaaggcaagttggcaagactatggaagggctacttcaagcttgacaggtga

SEQ ID NO: 163 - DNA, 1287 bp, Cochliobolus heterostrophus
atgagtgccttggagatatctagcgaagtatgtgacgttccaaatggcacccatgggacgaagcgccgccggagttcgactgtgctcaatccaaggagttatgtcaaagagaagctttggacacaagctccagtatttacgggtagcaccaactttgagccacttgcagatgcgaagaacatcttgatcactgggggcgccggcttcatagcctgctggttcgtacgccatctagtccttacgtacccccactataatgtggtttccttggacaaattggactactgcgcaacactcaacaacacgcgcattctcgatagccgaccgaacttcacattcgagcagggcgacatcacctcgcctgctactgtgaagcgtgtgctccgtagacacaaaaccgacaccattgtccattttgcggcgcaatcgcatgttgacctcagctttggcaactcgtacgagttcacgcatacaaatgtttatggaacacatgtcttgctcgagagagcgagggaacatggtgtcaataaattcatacacatctcgacagatgaggtgtatggtgatgtgcctgttggcgcagcagacctgggcgaaacgagcatactagcacccacaaatccatactcggccagcaaagcagcggcggagatgatggtcagcgcataccggagcagcttcaagctacccctaattacggtccgggcgaacaatgtatacgggccacatcaatttcccgagaagattatacccaaattcatcatgctcttacagcgaaagcgaaagctcctcctccacggcgacggctcaccaacgcggcgttacctctatgcaggagatattgtggatgctctggacaccattttgcacaagggtgacattggacaaatttacaacattgcctccaaggatgagatatcgaatacggagatctgctaccgtctccttgataatttcggcatctcgcgagatacgacgagcgaattaaaacaatggattcagtataccgaggatcgtcccttcaacgaccagcggtacgcaacggatggatcgaaacttgctgcgctgggatggcagcccaagacaagcttcgaagaaggccttcgcataactgtggattggtatcgtagatttggcgaagtgtggtggggcgatatcagccgggttctgacgtcttttcccgtggtaacaggaaatgaaatcaggacgaaggaggagcacgaagatttaccatcgtccgacggtgaggggatacacgaagaagatagtgcagtatggacagtctag

SEQ ID NO: 164 - DNA, 1500 bp, Cochliobolus heterostrophus
atggattccgctgaacaaagagagtggttctttcttgagaatttaggcctacgagtcaccctcatacttttatctggaatcaccgccttgattgttgattacagccgcatgctctatttaagaaaaaagatgccacctggcccattaccctggccaatagccggaaacactctcagtctcccgaaagagaggccttggtacatggttgagcagctctcaaaagactacaagtccccagtaattacgttctggattggacggttagtcctcaatgagatccttgtcaaacgctccaacatctacaactctagacgacacatgctcatgtttggtgagctgatgaatgaacaagataacctcatacacaaatacacatacaccaacgagcagcgggagagatttcgtgtcctgcgcaaaatcacacatcatggtgttggaacacaacaagttcaacaataccgagaatttcaagacgacaagaacatggtgctggcatacgatatcctaaaaacacctgagctatttgcttcacgttttgaacgctacgcggcgggcgttgtctctattgttggattgggacgtcgtatttccaacagtcaagatacgttgattacggaagtcatcgctcagatgcaacatgccgcacaactcgctgttgtggcaaaagactggctacggatcattgagacatttccttggttggtaaagcttccccgtagtatcgcaccctggttacgcaatattaaacaatttagcaaaacaaagtacggtcacgaaaactacgcaaaattcctctttcgcgaagccccacaatacaaccttagccgcggcgaagtctccagtcttgtctccaatctttttggcgcaggcgcagatacatccagtagcactctcatcacagctgtaattgctatgcgcgccttccctgagaccatgaaacctgcctgggacgaacttgatcgcgtagcaggccactcaagaagccctacgcttgacgatgaattgccttatgtccgcgcctttgccaaagttttccgctggcgcgcagtagccaacctcggaggaaaaactcatgcaccgactcaagacgactactggaactgctacttcatacccaagggaacttggatacaagggaacgtatgggctattcatcacaacgagcgcgagtttccggatcccgatcgatttaatccaagacggcgcctcgacacggaagatctgagaccgtttccgggagagaagggatacatgacgtttggatggggaggaggagttgtgctggtcaggcgcttgctgagcagggcacgcatctcagtgttgcgcgcttgctttgggcctatcacgttgagcctgctatcgacgagaaaacaggaagtgagataccagttgatatcttcagctatactaacggatcaaatcgacgtcctcagcctttctaggggaggaagcactgatgcgtctatcaaaatacgagaggccggcaaagtatatgcttga

SEQ ID NO: 165 - DNA, 5376 bp, Cochliobolus heterostrophus
atggaggttgtatatttcagtaatgagttccctaaagatgatctctcggagatcttcagacacttgcacaaccaaagcaagaccaccgagcacgaaattctagcccgcttcctcagagacgcaacaagagcagtcaagaaagagattgaaagactcccatcaactttgaaaaaccagatccctaccttcgatactctcatctcttgggtagagaagaaggagctccgcgagggtgaactatgtggcgcggtcgatggagttctgctgatactcgttcaactcgcggtttacatatttaatgctgaaagcagtaatgattcaacattctcgcacgatgaaaagcacctcacgggtctgggcgtcggcttgctttccgctaccgcggttgctctagctcgagacatttctgaactagctttctacggtgtgcaggcgatcacagtcgccttccgcatgggagtccatgtacaaggcgtttcacattatctagaagctcgagacccggctgaacccccaaagacatgggcttatgtggtccataacgttgatccccaagagacgaaaaaggagctagaagcataccacgaagcagtgcccagttcggataccagtcgtatcttcatcagcgccatcagccgaacatctgtcacaatcagtggcccaccttcaaaacttgaaaatctcttcaagaaggccacagcattcagagacgccaagtccattgcactgcctgtttatggaggtctttgtcatgctccccacatatacgactctcacgacatcgaggctattgttcaagacgttgtcagttcatcggatcgacttgtttcgcaaaacgaaccaagatttccacttttctcgacaagctccggtactccatacatatcatccagccccgcagaactgatcaagagcgttgtagcagagctcttgacaaaggctattgagtgggacaaagttattgcacaggaggttgaatacgctaagcagaacaaccgaactcaaatcaggctgtcttgctttggcaactccattccattgaatgatctgcgttctgagttgcaaaagacatccaaggatacttctatttccttgaacacctacatgtcggcgcttctcaaggatgctactgagaatgtaaccccccgaggtccagcacaatccaaacttgccattgtgggaatgtcttgcaggcttccaggcggatcaacggataccgagaaattctgggaagtgcttgaagcagggcttgatgtgtctcgccagatacctgcagaccgattcgacatcaatacgcactatgaccctgaaggcaaggatctcaacaagacaatgacgcaatacggatgcttcatcgaagaaccgggaatgttcgacccaagtttcttcaacatgtcacctcgagaggcgatggttgttgatccccagatgcgactctcgcttgtcactgcgtatgaggcattggaacgggcaggctacgttgccaacaggacccagtcgaccaggctccagcgcatcggaacatactacggccaagcagctgacgactatcgcgaggtaaaccaaggacaggaagtcggaacctattacattccaggaggatgccgtgcttttggacctggtcgaattaattacttcttcaaatttgccggtcccagctacagcattgacaccgcctgctcctcaggtctcgcggctatcgaagtcgcttgtcaagctctttggagtggtgaagttgacactgctgtagcaggtggagtcaacatccttacgaaccccgatggttttactggtctcagtaagggtcacttcctaaccaagggccacaacgcctgcaaaacttgggacgctagtgctgatggctactgtcgcgctgatggcgtgggatcgattgtcatcaagaggctcgaagatgcacaagctgataaggataacattcttggtgttatccttgctgcaggcaccaaccattcggcagaggctgtctccatcacccatccccatgcaggacatcaatcatatttgtcgcgccagatcattaggcaggcaggtattgatccgctggacgtttcatatgtagagctccacggtaccggcactcaagctggtgattttgaggagatgaagggtgtcctagacgtgtatgctccaaacacctttcccaaccgcaggtctgatcagaagctacacattggaagcgccaagtcaaatgtcggccacggagaatcagtggctgggactacagcacttatcaaggtcttgttgatgctgcagaagaatgccattcctccacacatcggcatcaaaacagaggttaacccacgcttacctaaggatctggatcagcgaaatgtcgcaatcccgttctccatgaccgaatggaagagtgatggcaagaagaagcgtatcgcggctgttaacaacttcggagctgctggcggcaacactatgatgcttttggaggaagcacctccagtcgtggtggcacgcgagaaggaaaccaggccaacacatgtcatcgccgtgtctgcgaagaccaagacctctttgcgcaacaacatcaaccgtctccttgtgtatctcgatagaaaccctgatgtctccatttcggatctcgcctataccacgactgcgcgcaagtaccaccactcgtacagggtcgcagttagtgctacggatcttgcttcagtgaagaagcaactgtcaacacagcttaacaaggttgattccttgaaacccttgaacaaaaccaacccgccgtcaatggcatttgttttcactggccagggcgcctcgtaccagtcgatggatctcgaactgtaccacgaagcaccagtcttccgagagcacattcaatatctcgacagacttgctcaagcccaaggcttcccttcattcatcccagccttggatggctcccacccacgcgaccacgagcaccctcctgtcatcacccaactagccctggtttgtctcgagattgcgttagcccactactgggcttctttgggcgtcaaacctgatgttgtcatgggacactccctcggcgagtatgcagctatgcatgtcgctggagtcatcagtgcgaacgatgccatctacatggttggttgtcgggcactgatgctccagaagtcatgcactccgggcagccactgcatgatggctgttcgcgcgtctctcgagtctatcatcggcgcatcgaatggcaagccacacactgtggcttgtatcaatggtcccactgacacggttctaagcggcaccaaggcacagatggatgacatcgctgtagatctcgaggcagctgggttccgttgcatcaagcttaacgtggcatttgcattccactccgaacaggtcgacccgatcctcgacgagttcgagacgattagcaagagtggtgttattttccacgagcccaagcttcctgttgtctcaccccttctcggcaaggtcgtctttgacggacggtcgcttaacgccagctacgtgcgaaatgctacacgagcaacggttgacttcctgtccgctgcgaagaacgcttgcgatgtgtcaatcatcaataaagagactgttttcatggagatgggtcctcaccctgtctgtgtcggattcatcaagtccattttcccatcgacaaagaccgccgtcccgtccattcgccgtggagacaacaattggaagaccatctccgagagcgcagcagctattcatctcgatggcgttgatgtggactggaatgagctccaccgtccttttgcggatgcagtgcgtcttcttgatcttcctacatatgcttgtgatgagaagaactattggatacaatacaatggcgattggtgcttgaccaagggcaataccttctacgacaagaaggtcgaggcggcagagcctgcagttggcaataccaagaaatatgagtctttgagctctttggtacagaacatcatttcagtagatgtgaatggagaccagggcactgtgatcatgcagtcggacttaatgcagaaggactttttggctgctgcccatggacactcgatgaacagctgtggtgttgtcacatcgtccatccatgccgaaatcgcatacactctgggagagtatctctaccgcaagttctacccaaagacaaagcgagtggacatgaacatgagcaacttgcacgtaaccagtgccctgatcgccaagaaacactccatggacactccccagtccatccaggtcactgccagtaccaacgacatcaagagtggtactcttgacttgacatggcagaatgtcgaagaagatggcagcctgtcggagccattcgcaacagccaatctcgagtatggcaacgcagacgattggctgtcgagttggagtcccatggcacatctagtccagcaccgtatcgagtctttggagcagctcgctgccgagggcaaggccaaccgcttctctcgcaacatggcctacaccctcttcgcaaagaacctcgtcgactacgcggacaagtaccgcggcatgcaatccgtcgtcatgaacgatctcgaagccttcgccgaagtgaagctcagcgacaaagtcgacaacggaacctacaccgtacccccctacttcatcgacagcgtcgcccatctcgccggcttcatcatgaattgctccgacaccatcgacaccacaaataactactgcgtgacctcgggctggaaaaccatgcgcttcgccgagccccttacccccggcgctcgataccgctcctacgtcaaaatgaccccaaccaaggacgacccctccgtctacctcggcgacgtcttcgtcctcagcgcagcagacaactccattgtcggcatggtcggcggcatccacttccgccgcttcccacgcgtcctcctcaaccgcttcttcaccgcgccccagcccaccaagggcagcgctcaacccgccaaatccgccgcaccacccgctcccagcaagccctccgcaccacctaaagtgcaagcggttcaggcagcaccggtcgtacccgtcgctcctagagaagacgacacccagtcctccgccagcgacacgtccgaccgcgataccccctccgaagcctcagtcaacacatccgctaccagcgtcgatgtgtctgcttctgcgccccgcgctgctaacaccactgttgacaaagctatcgatcttatcgccaaggaaacgggtatcgacgctgctgagctgaccgacgatgcagagtttgccaacttgggtattgatagtctcatgtcgctggtgttgtccgagaagttccagaacgagctgagtgtcaaggtgaatggaagtttgtttttggattatccgacgattggggatttgagggagtggttggagaagtattatgcatga

SEQ ID NO: 166 - DNA, 996 bp, Cochliobolus heterostrophus
atgacggacgataaagggggctacaagcagatcaacaagtcgctcaacatctgcgctttcgaggactatttgaaaggccagaccgcgaacctcgcccctatacctgatgtggagcaagtgacagaaagggttttacgagtgcggggtcaaaatccggggaagttcaccttccaaggcaccaataccttcttagttggaacaggagcctctcgcatattgatcgatacatccggaggagagcctgagtatgcgaagctgcttgcatcaacccttgagtctcggaacattagcatcaagtatgttcttgtaacacattggcatggagaccactccgggggtgtaccggaccttatcagaatgtatccgcacttgaaagatcacatctacaagaacgatcccgatccgggccaacaagatatccacgaagggcaagagttttgtgtcgagggggctactgttgtagcactgcactgcccggggcattcagaagatcacatgtgtttcatgctcaaggaagagaactccatgttcactggagacaacattctcggtaccgggacgagcgcggtcgaagacttgggcatattcatgtccagtctgcacaagatgatggatcagaaatgtcgagctggccaccccgcccatggcgttactattgatgatctaaacacaaaaatcagccgagagctatcgtcaaaatacaggagagagaagcaagtcatcagggccttgcgcaacctccgcgattacgggcaaaaccgaccggtcgttcgtgacattgtcgaaaacatatacggaaactcggtggatgagactacgcgtacgttggcgctggagccgttcatcgacgaagttcttcgaaaacttgctggtgatggtaaagtgggtttccaggttcgcgctggccagaaaaaatggtttctaattggtaatgagcaatcaacggtgggtgggatgcggcaggtccagtaccctgtcacacgcgccagcgcttaa

SEQ ID NO: 167 - DNA, 522 bp, Cochliobolus heterostrophus
atggagaacactctcgttcaagtcgcgcacgcctggggtgtaactggtgcagcgcttttgtcaggcttcatcgtgtgcttcagtcatgccggagtgccaacactcagcgtagctccagtcgacacacttgtgcatcagttcaagaccatgtacaacattggaaaagcgacatcgcctctggtcgccattactgtcactctatgcaatggatactctgcctattgctctagaaacgacaccaatctggtcggcaatgttgcatcaccatttaccttgtacgcagcagcagcgatctttgtacctctgattgtcccgtatacattgctatatatggaaccccaggttaacaagagattgttgacactaggtggaatggtcgagcagggaactaaagcgaaggaccttggggtgagcgatgaggaagttcgagtcatgttgaagaggtggaagggaatgaactttgttcgagcagcacttgtggctcttggtgctgtactcagtgctgtcgcttcatttcgttag

SEQ ID NO: 168 - DNA, 546 bp, Cochliobolus heterostrophus
atggctgctttggatatagcgtttcacatcatacctttcatacattggggcatgattgtatcgttgttcattgtatcgggaatagcatggtccttcaacctatgggtcgtgccgatcattaagatgaacccatcgaaaagcgccatcgcacagctattagagacatcccgacgcggcggagcttggctggagccattgaatgcaagctttgcatttttgtttggtataacggctgctctgatttcgcagcaccctgatccaagtgtagcttcacagtggaagccgtttgcggcctcttttgctacgctgcttcaagtagcatggtgggaaagagtgatgatctttccgcttgagggatcaattgcgaatctaggaaagggcaaggaaaagagcgggggtgctgagggagcttggatggaccatgagaccagcaaggtcctgcacaagtctctggatgagtggtctcgatggcatgcagtccgcgcaacgctgccattgatcggatcgctgatcgcatttgtcacgaagcttcaaagtggggtttga

SEQ ID NO: 169 - DNA, 498 bp, Cochliobolus heterostrophus
atgcctcacaagacagaagtcagaccagctccagcagctacagacatcatcgaatgtcaagctgccgcatttgaatgggctgagagttacgatagcaaagactgggaccgtctttcaagatgcctcgcaccagaactctacattgactaccgcaccgtaatgggaatgatgtgggaaaagatgccagctgcagagttcctcggcatggcttccagccccaggtttctcggtaatgctcgcatcaagacccaacatttcatgggccagacaaagtggatccagaaagaaccaggttacattatcggacaccatcagatgcgtgtagcgcatcaaaagtatgaggatgatgcgctgacgcaggtgctatacaagggtcatgcgcacgggaatgctactttacactatcgtcaagtcgatggcgagtggaagttcgcgggccttgaacctggtattcggtggtccgagggtgattacgcgaagatttttgaacagcattag

SEQ ID NO: 170 - DNA, 732 bp, Cochliobolus heterostrophus
atggtgtcgtatgcagttctcggtgccactggcaattgtggcactgccctcctagagcttctcatcaagaacaccgatgccaaagtcaaagcctactgccgcaacaaagacaagctattcagactagtccccggagccgcaaacaactccagggtcgaagtctacacaggtagcattctagatgccgatctgctcggcaaggcaatgtatggttgcaaagccgtctttcttaccgctaccaccaacgacaacgtacccgggtgccatatcagccaagacctcgcgcacaccgtcatcaaagcgctagagaagacaaagtctgagggaagccaggctccaccgatgccaagactggtattgctgtcctctgctactatcgatccttggatcagccgaaagaacccttgggtcaacgccattgttcgccgatctgcatggcatgtgtaccgggacttggagcttgctgaagagttcctccgaaagcacgaagactgggtcaagtgcgtttatatcaaaccaggaggcttgtcggtagatgtgcagaggggtcacaggctcactttggatgacgaggagtcgtttgtttcatacctcgatattgcggctggtatgattgaaacagccgaggacgacgagggcaagtgggacaacaaaaatgttggcgtagtgaatgcaggtggcaaggccaagtttcccagggtgattatgattgctccgactcccgacgactga

SEQ ID NO: 171 - DNA, 813 bp, Cochliobolus heterostrophus
atgccacacgtagaaagcacaccctccacctacatccccggccgcctcgacggcaaagtcgccctcgtcactggctccggccgcggcatcggcgcagccgtagccacgcatctgggccgtctaggcgccaaagtggtcgtcaactacgccaactcgaccaaagatgctgaaaaagtcgtctcagagatcaaagcgctgggcagcgacgccatcgccatcaaagccgacatccgccaagtctcagacattgtccgcctcttcgacgaagccgtcgcgcactttggccacctcgacatcgccgtcagcaactctggcgtcgtaagcttcggccacttgaaagacgtgacagaagaagaattcgaccgcgtcttcagcctcaacacgcgcggccagttcttcgtcgcccgcgaggcataccgccatctgaccgagggcggccgcatcattctcacttcctcaaacacggcccgcgacttcagcgtgcccgagcactcgctctactccgggtccaagggcgcaatcgactcttttgtacgcatcttctcaaaggactgtggcgataagaagattacggttaatgcggttgctcccgggggcacggtgacggacatgtttcatgaggtttcgcatcattatattccgaatggccttgagtatacggctgagcagcgtcagcagatggctgcgcatgcgtcgccgttgcataggaatgggttcccgcaagacgtggccaatgtggtgggatttttggttagtaaggagggtgagtgggtgaacggcaaggtccttacgctcgatggaggtgctgcataa

SEQ ID NO: 172 - DNA, 4317 bp, Cochliobolus heterostrophus
atggacggccagggcagaccagcccctgtcccgggagaacttgctggcagcgatgtaaacgtatccactcactcctctatgcccccttcacccaccgaaaaacatcagcaaaacgaaatcaaagatttggaagacggtgcagaccagagttcaacaaacactcaggttgagcaatggaggctggccaaagatctcaagtactttgacatcaacagccaagccagcagccgcaagctaggcgtcacatggaagaacctcagtgtcggcgtagttcctgccgacgagcgattcaaggagaacattcccagtcagttcaatcttctacagctcctcaaggacttccgcgcaaaaccagctctgaagactattctcgaatccagctcgggatgtgttcgtcctggagagatgcttctagttttggggcgcccaggctctggatgcacgactttgctcaaaatgctagccaacaagcgtaatggatatgcaaatgtagatggcgaagttcattatggatcgctcgacgccgaacaggccaagcaatactctggtagtattgtcatcaacaatgaggaggaactcttctacccaacactcactgttggcgagaccatggactttgccactcgtctgaacatgcctgcaaacctcgaaggaaatagatccagccgcaccgaggcccgacgcaactttaaacaattcctcctcaattcaatgggcattgcgcacacagagggtacaaaggtcggtgacgcatacgtgcgaggtgtctctggtggcgagagaaagcgagtctccatcatcgaaactctcgcaacacgtggcagtgttgtatgctgggacaactcaacacggggcctggatgcctccactgctcttgaatatgtccgcgcactgcgatgcctgacagacaccatgggaatgtccaccattgtcactctgtaccaagctggcaacggcatctatgacctgtttgacaaagttctcgtcctcgatcagggaaagcagatctactatggctcccgcgaggaggcccggccctttatggagagccttgggttcgtctgtggagatggagcaaatgtcgccgattatctcactggtgtcaccgtgcccagcgaacgacaaatcaaacctggctttgaaaccacctttcctcgcaagaacaccgacatacgatatgcctatgagcagtcgaccatcaaggctaagatggatcaagaactcgattatccctttacggaagaggccaaggtcaccacagaagcattcgtcaaatctgtcttgcgagagaaatctggacatcttccaaagtcatcgcccatgacagtctcgttccccgatcaagtcaaggcttgtgtagtccgccaataccaagtcctatggggagacaaaccgagcctgatcatgagacaagcgaccaatatcattcaagctttgatttccggatcgctcttctacaatgcaccagacaacacggctggcctgttcctcaagtctggcgctctgttcttatctcttctgtttaatgctctcttcaccctttcagaggttaacgactcgttcgtcggtcgtcccatcttggcgaagcagaagaattttgcatttttcaacccagctgctttttgcattgcacaagtcgcagccgatattccgattttgatctttcagacagcttcttttgtcttaatcgtgtactggatgaccgcattgaagcaaactgcggcggcgttcttcatcaactggtttgtcgtctacgtcgtcactttggccatgactgccatgatgaggacgattggcgcaggtttcccctcgttcaactctgcatccaaggtttcgggcttcgccatcaccgcgacaattgtctacatgggatacgaaataccaaagcctgacatgcacccatggtttgtctgggtctactggatcaatcctttggcatatggattcgaggctatcatggcaaacgagtatgacggaaccaccatcccatgcgtctacgacaatctcatcccgaactatctgcctcaataccaggatccaagcgcacaatcctgtgcaggtatccgcggtgcgcgacgcggcgcaacttcgctcagcggacaagaatacctggacagtctgtcctactctccatccaacatctggcgtaatgtgggaatccttttcgcatggtggcttctattcattgcctgcacaatcatcttcacgcttcgctggaatgacacctccagctcgagcactacctacatcccacgcgaaaagcaaaagtacgtccaaagacttcgcgcatctcagactcaggatgaggaatctctgcaaaccgaaaagatcacgcccaacaacgacacgcttggtactacagatggggcaaacgacaagctaggcactagcctgattcgcaacacctcaatctttacctggcgcaacctgacctacaccgtcaaaaccccctccggtgatcgtactcttctcaacaatgttcatggctacgtcaaacccggtatgcttggtgccctcatgggatcctctggcgctggcaaaacgacactactggatgttctcgcccaacgaaagacggctggaacaatcaagggtgaaatcttggttgatggtcgaccccttcccgtttctttccaacgatctgccgggtactgcgaacagcttgatgttcacgatgcttactccactgtacgagaggctcttgaattctcagctcttctccgccaaagccgcgatacccctattgaggagaagcttgcatatgtggataccattattgatctgcttgaactacacgaccttgagaatacgcttattggaaccgtgggtgctggactttcggtcgagcagcgcaagcgtgtcactatcggagttgagcttgtttccaagccgtctattctcatcttccttgacgagccgacctctggtctagatggccaggcagctttcaacactgttcgtttcctgagaaaactcgccgacgtcggtcaagcagtcctggtcaccatccatcagccctcggccttgctcttcgcccaattcgatgttctccttctcctcgccagtggtggcaagaccgtctactttggcgagattggcgacaatgccgacaagatcaaagagtactttggccgctacggtgcaccctgcccccgcggcgccaacccagcagaacacatgatcgacgtcgtgagcggctaccaccccagcggcaaagactggcacgaagtctggctcaactcgcccgaatctgcagccctcaacacacacctcaacgaacttatctctgacgccgcgagcaaagaacccggtaccaaagatgacggccacgaattcgccacaaccttctggacacaaaccaaacttgtcacgcaccgcatgaacgtcagcttcttccgcgacacagcctacttcaacaacaagcttctcctccacggcggcgtcgccttcttcatcggcttcaccttctggcaaatcgggccctcagttggcgaccaaaaatatatcctcttctccatcttccaatacatcttcgtcgcgcccggcgtaatcgcccagcttcaacccatcttcctcgagcgccgcgacgtctacgaaacccgcgagaagaaatctaaaatgtactcctggcaagcctttgtcactgcactcatcgtctccgagatgccgtacctcgtcatctgcgcagtgctgtactatctagtcttctacttcgcctccggcctgcccaccgaccccagcagtgccggcgctgtcttcttcgtcttccttatctaccaattcatctacacgggcttcggccagttcgtcgctgcctacgcccccaacgctgtcttcgcctcgctcgtcaacccgctcctgctcgccgtcctgtgctgcttctgcggcgtcctcatcccgtacgataacatccaggagttttggcgctactggatctactacctcgatcctttcaagtacctcattggctcgctgctcgtgtttaccgactgggactggaagattgagtgtaaggagagtgagtttgccatttttaatccccctggtggcggcaatcagacttgtggcgagtacctcgaggcgtggctccagggcccgggtagacgcacgaatcttgttaatccggaggctacggcggattgtcgcgtttgtcagtatacttggggtagggattaccttgctactgttaatttgacggaaaagtattttggatggagggatgcgggcatttgtgttattttctcgttgagcgggtatgcgcttgtttatttttttatgaagttgaggaccaaggcgagtaagaaggcggagcagtag

SEQ ID NO: 173 - DNA, 957 bp, Pseudogymnoascus pannorum
atgactttccatcccgacactctacccgtcctcaagggcaaagtattcatagtcaccggtgggaactccggcataggctactataccgtatcccacctagcagaacatggcgcccacgtctacatgtgcgcccgatccccaaagaagggcacagaagccatcagaaacatcaagaaaatgcacccctcagccaatatcgacctcctgcaaatggacctcatggacctcaccagcgtcgtcgcagccgccaagttattcatcaccctcgaaacaaccctgcatggcctggtcaacaatgcaggcatcatggctacgccttttgaaatgacgaaggatggttacgaggcccagtggcagaccaactacctctcccactgggttttgacggagcatcttctccctctcatgttgcagacttccaagacgctttctcctggcagcgtccgcatcgtcaatctaacttcatcgggtcacttgagcgcacccaagggcggtatcaatttcgatgatctatcactcaaggacagcggcccatggtcacgatacggacagagcaagctggccaatattctgcacaccaagactctgcaaaattcgtacggccccggttctcccagtgcgcagaacggggggggcgagatctgggtttcgtctgtgcatcccggcgtggttgatacgaaccttgccacatcggtggaggagtccgggacaggcatttcgagtcttctctcaatcatgcgcatggtcggattgatatggcctgcggataaggggtcgtggaatagtgtgttttgtgcggctagtcaggatatgacggcggagcagagcggggcgtatatggagatctttaagcgttttggagagctgaggtgccagagtggtgcggcgaaggatgagcagcttgcggagaggttagaggagtggactagggtggcgatggctgtggtttctaagtga

SEQ ID NO: 174 - DNA, 873 bp, Pseudogymnoascus pannorum
atgccacagttggccgaagcaataagcaaggaagacgactggactgggaccaaggatgctgcagcgcgcagaagggcacagactaggcttaacacaagggcataccgaaaacgcaaagccttggctgcaaataagacaccggttaaatcagaagagctggtagagtgctgggacattaagcagcaatccttctccgtcgtcccagcatcccgtattaaggaattatacaatggcagaagtgccttgctgccggataaacaaagaaaagcccagtttaacattgtcttccctctctgcccagaccacctcattacactcctccaatacaacgccctccgcgctctggctgtcaaccgcactctaatctcaggcatccttgttacgccgctcgactgtggcgaagaaattatccacgtcatcccttacccctccaagcccgaactgctccctttatcacttttgcccaccgtccttcaacaaacggtgccgcacggggactggattgacatgttcccgtgtcccgaggggcgagaccgactaattcgagccgccggcaccttcgacgaggacgagctctgggccgactgcatcggcgggctgttcgaaggctttcccgacgacgaggtcgagcgacgcggcattattgcgtggtcgccgccttgggatatcaccgggtgggagatgtcggaagggtttatgaggaaatggggatggctgttcaaagggttgccggggccgttggcggcgacgaatcggtggcggatgcagagaggcgaagaaccgtttactcatgatgactgcatgtcacatgcaaccgtgttacctttgtgttgtccagatacttcttcgtcatcggatgagctgggtgtttaa

SEQ ID NO: 175 - DNA, 1548 bp, Pseudogymnoascus pannorum
atgttggacttagaatccgacacccaagttgatcagacgcgtaagcaggtatcgtcgcggtcaaagcttcgcgacagctgccatgcctgtgccatttccaaggttaaatgtcccaaagaaaaaccatcatgttcaaaatgcgaatgccgtggcatcacatgccagtacttcttggctaaacgtcctggtcgcaggcgtgagaacaacacagtcaacggcacagggagcaacacaagtcgatgccagtccagcaaaagtcttgcaacaagctccaactccagctccagctccaattccaactctaaccccaataccaaatccaataccgacagcagccggtctatggagtgggaggcacctctagatatgcaacccactcccggaaccggcttgctatcaaaaggaggcacaataattccaaccaattcgtatggcaccgatggctaccttatgacacctttaagcctaagcgtcccggcatctccaagacaagacaatatgttttcaacaaatgcagcacaattttctgtacctggcgaggtcggcatgttctctggtctagtagattttggatctgaggtcaacgacatggatttcatcatgtcggccatggattctccgtttgacctgcttggaatggagtgcggtggcatcactggtagcatcacgcaaacaccaaatgatattgagtcgctcctcatgccaaccgagagagtcgattttgaccatgcttcattggatacgccatcctcacttgatttattgagcacatcgagcgcggcgtcatcaaccgcctccaatatccattcgctgccgactgggatgacgagtatatcggatatcatcgaaacctcaccgtgtggatgtctgatgcaagcactagatctcttgaagaagctttccactagctcaacctcttcccgcacggcatttcccagtctggatgccacggacatgccaagaactgttaatgctagttcagcgcagactgtcgtcttcgaaaataagcaaggcatggaagctgtcagtagcaagcttgcatgctcgtcgtgcgttgacgatggcttcttgctaacagtcatctccatgatcgtgctgaaaatattagaacgatatgccactgtggcgcaggcacagccgcgcaagactggaaaaagcgagccggaaactgacaatccagtgaggctatcgatcagcactacttctggtagcgatgactggatgagagcgccaaatcatgtccttaatggatcgtatgacgacggaggaagcgagcgcgtggccgctcagcttgttctcagcgagctgcatcgcgtgcagaggttagtgaaccagctgtcaccgaaactcaaagggccaaaggagagagaaggtcaaaatatagccccgaagatgaggtactggggccgtcctagggctgcaggagatggtgacagaatgacgttgacttctatcttggctggcaccttggaccaaatggagagggatgttcgcaaaagcttgagtactctgtcagcagagataatcaacgggctacggcaagtttaa

SEQ ID NO: 176 - DNA, 1347 bp, Pseudogymnoascus pannorum
atggatagattgacggaactcaatggtcatagcgatcagctcgcccaagctatcaggagcctcgtcgatagccgtcgaggagccgattcttctgaccagctggggccaagtgctgacactgatgtagacagagatcaatctttattcacaagagccaagtcaaatattctggccagtattgcagcaatcaagtccatagttggtgaaccagcagacttcctccaggatttttctcgccagatcgaaatccttgcttgtcttcggtggctagcggaattccaagtttttgcgtgcatcccgtttgacgaaagcttgcctatcaaggatttggcggacctagtaggagttcccgagagccagttggttcgtgtcatccgtctgactgccacatgcggatttctgcgggaaccgatactaggctttgtgtcccacagccccctctcggcgcaattcatatccaaccagtcattagttgacgctatggtgtttattgccgagttggctactcccacagcattgcagatgccgcaagcaacgcagcgatttggagcctcgtcgagtgccaccgagagcgcatacaacttagctctcaatacggtgcggccgtttcatgtggctatccaagaacgctctaagctgcgtcgtcaatggtcagcttacctttgccatgcagcagggttgcaccaggaggaagaaatcatcgaagtgttatcgcggctcaactggtctaaccttggtaatgcgtgcatagtcgaggtaggggcaaagtcgacctcgatggcaagctctctttccaaaatgtttccaagcttgcggttggtcgtgcaaatcgacaatacacaatcttctttgctagatcgagactacatgtggcaaaatgcagttctggcaagctcaatccgggacagctctagctctggatctagcccttctcccacaaacccttttatcacggttacctatcatgccatgggcatgccgcagtctgtgacagatgctgccgtttatattattcacgtgcctgccacatcctcaggattgacgattaaagcagaactggatgattacttaggtgtgcttcgtaccagcgggggcatcatgcttatcttgacgacacgactgcttcccgagccaggcactcttcccaacccagagatcgaggccgtggcgcgcgcacgggatctgagcatgctccaactggccaacgagagcgagatggagatgtccgagcttctgagtataataaagacggtgggggacaacgctgggaaactcgttgtcactaatcaccttcgctcaaacaatggcgtcatcctagctttaactatcaagtaccaagcatattaa

SEQ ID NO: 177 - DNA, 1002 bp, Pseudogymnoascus pannorum
atggagaacgacaagggcggatataggcagatcaataagtcgttgaacatctgtgcctttgatgagtatcttaaaggtcagaccgcacgactgccgcatatcgagagtattgaacagcttactccaagagtgcttcgcgttcttggccagaaccctggaaagtttacgcatcaagggacaaacacatacatcgtcggcactggccaacgacgcctcatcattgataccggtgggggcgagccagcatgggccaaactgattgactcaacatttatatcaatgaacatcagcctctcatatgttctgctgacccattggcacggtgaccataccggcggagttccagctcttctgcgcctatacccacatctcacgaattccatctacaagaacgaaccggaccaaagccaacagaacatcacccacggacagatattttctgttgacggcgcaacaatccgtgctattcatgtgcctggacattcagaagatcacatgtgttttatcttagaagaggagcaggcaatgtttaccggtgacaatatccttggccacggtaccagtgctgtagaagacctcggcacgttcatggccagcctacagaagatggctgcccaggattgccatatcggttattctgctcatggcgccacagtcaccgacttgccagccaaaattaccggggaattagataacaagttgcggcgcgagaagcaagttatgaatgcgcttggcagagtccgtagccgcggcgagaagagcgtcaccaccaaagacttggtaacagagatctacggcgagtcgcttgacgaagatacgaggatactcgcattggagccatttatcgacgaagtgctacggaaactagcgaatgactgtaaggttgcattcgaaatgaggagaggcaagaagaagtggttctctgtggaggaaatggaggagacaaccacgcagcggtttatggctctgaaaaatccactggccgtaactattcaagtttaa

SEQ ID NO: 178 - DNA, 5400 bp, Pseudogymnoascus pannorum
atgtccgtacataccccaaccacggattcggaatcctacgagggttttcgcaagatggagattgtctattttagcaacgacttccctaaagatgacttggttgacgtttttcgccgcctacacaaccatagcaaggacaagcatttccctgtcttggcccaattcatacgtgaggccacctgggctatcaaggacgaagttcgccaactaccaactgagctcaaacaactgattccgccattcaatactctattggcttgggcggaaaacagccagcttcgggaaggcctaatctgtggggctgtggatggagtgttgctcgtcgtcgctcagctagcaacttacattggatatgtcgagagtcgctctggagatttgtttgacttttcaattacatctcttgctggcctaggcactggcctactatcgtcgagtgccgtctcattgtcgcaaacattggccgacttgccactggcaggcgcagatgcagcccgtctcgccttccgcctgggcattcatgtcttagacatgtcggagaacctggaagctcgtgatttatcagaaagcccagattcgtgggcgtacgtggttcacaatgttgacccgactacggcctacaaggagctagatgacatgcattctcgaatggagatacccaatactggcaaaatatttatcagcgctgttagccggacatcagtcacagttagcggaccaccatcgaggttaaaagcgttgtttaataagtcagagttattccgcgagtcgaaggtcgttgagctgccagtgtacggcggcctctgccacgcgccgcatatcttcggtctggaccatgtacatagtatcgttcacggctgttcattaaacgccgctatcacaaattctccgccagttattccagttttatcgaccagcagcggtttgccatatctggccaagagttccatggagatgtttgaatgcgtcgtctcagagctgctcacgcaaacaatctattgggataatgttgtcagtggcatagtcgaacgagccaagtctaacgttaccgcggaagcagtgcttcactgcttcggcaactccactccccttaacgacctcaatatgaccctgaagagcaatgttccagatctcgacgtctcgatcaacagtcttatgtcatggatctctcaggtttcaccaagagatactacaccccacggcactgcacagtctaagctggccattgtcggtatggcctgcagatttccaggaggtgccacaaatactgagaagttttgggagatcctagagcaaggccttgatgtctcacgtcgagttccagctgaccgctttgacatcgacacacactacgacccaaccggcaagcagcagaataagaccatgacacagtttggctgctttattgatgagcctggtttgtttgatgcgcctttcttcaacatgtctcctcgtgaatctcaggccgtcgatccgcagatgcgtttggctcttgtaacggcatacgaggcactggagcaagctgggtacgtcggtaatcgcacagctgctacacagttgcaacgcattggaacatattatggacaagccgccgacgactaccgtgaggttaaccaaggccaggatgtaggcacatactatattccaggcggttgccgtgcgttcggccccggtcgtatcaattacttttttaaatttgcgggtccaagctacagcattgatactgcttgctcttccggacttgcagcgatcgaggtcgcttgtcaggctctttggaacggcgatgtagatatggctgtcacgggcggtgttaatgtgctaactaacccggatgttttcgctggcctttgcaagagccatttcctaactaaaggtcacaacgcatgcaagacctgggattctaccgctgacgggtactgtcgtgcagacggcgttgggtctgttgttattaaaaaactcgaagatgctgaagcagacaacgacaacatcttgggcgtcattctcggtgcgggaaccaaccattctgccgaggccgtctctattactcaccctcatgccggccatcaggcgtatctgtctcgtcaggtgcttcgccaggccggcgtggatccattggatgtttcctatattgagctccatggcactggtactcaagctggtgaccacgaggagatgcaaggcataatggaagtgtatgctccgctcatcaagcgacgtaggaaggaccagcccctacacattggtgctgtaaaagctaacgttggccatggtgaatctgttgctggcacaacggcattgatcaaggtgcttatcatgctccaaaaaaaatctatcccgccacatatcggaatcaaaacggagatgaaccccagattcccccgagacttcgacaaacgcaacctccacatcgacttggaaatgacaccctggccgcaaacatcgtctaagaagcgacttgcagttgttaataactttggtgccgctggcgggaacacgactatggttttagaggaggcaccaactcgagacatatccgaggccgatccacgcaatactcatatcatcgccatatccgccaagactaaagggtcattaacaggaaatattgagcgcctgatcgcccaccttgatgcgaatccagatatcaaccttgccgacctttcctacacaacgactgcacgtcgctcccatcacagccatcgtgtagcaattgccacttctgatataggccacctaaagaagcagcttacttcccgcctagaaaatatcgattcaatgaagcctattggaaattctggtagtccaccagtagctttcgcctttactggccagggctcttcttataaatcgatgaaccttgagttgtaccacgatgtaccaacattcagagagcatattcagcatcttgattctctcgctcgacgccaaggctttccatctattattcccgctctagatggctctcatcctaaggaccacttgcactctccggtagtcacccagcttgccctggtatgcaccgagattgctttggcaaaatactgggtttctcttggaatcaagccagacgtggtcatgggtcacagtctgggcgaatatgctgcgatgcacatagctggtgtggttactgcaagcgacaccatattcatggttgggcgtcgtgctcaaatgctagaagaaaagtgcacgattagcagtcatagtatgatggcggtccgggctactcttcagcaaatagaggaatgcttaggaacaaagccgtatacgattgcttgtgtcaatggaccttccgatactgtcctcagcggtactaaggagagtacagatgatgtcgctgtggtgctcgaggcggccggttaccgttgcttcaagttggacgtcgcgtttgctttccactcagagcagaccgatcctattttggatgacttcgaggagatatcaaagactggagttgtttttcaggaacctaaacttcctttcatctcgccattgctcggaaaggttatttttgacagtaagacgctgaacgcaaactacgttcgccgagccaccagggagcctgttgacttcttgtctgctttgagaaatgctcaaaagatttctaccattagcgatgaaactgtctggatcgaaattggaccacatcctgtctgcactaactttgtcaagactaccatcccgtccacgaagcttaccatcccatcgatccgtcgtggagataacaactggaaaaccatggctgaaagcatggctgctctgcatcttgctgggtttggggtcagttggaacgaattccaccgcccatttgagcaaaggctgcgccttttagacttgccaacatacgcctggaatgacaagaactactggttgcagtataatggtgactggtgtctgactaagggcaatactttctacgatgccgagaaggaggctgccagagcaaaatctgtactaagatcgctgcctgcgagcgggtttctgacaacgaccgtgcagcagatcatcgacgagtcttttagcgattttgctggcacggtggtgatgcagtctgatcttatgcaagcggatatgctcgccgctgctcatgggcacagcatgaacaattgcggtgttgttacatcttccatccacgctgacctcgcctacaccctcggcgactatatataccgcaagttctatcccaaagccaaggaagtcaatgttaactttgccaacttggttgtcgcaaaaggccttgttgcccaaaacagcaacaagactccccaattgttccgtgtaactgctgtcactgccgacgtccgctcaggcgtggtcgacttaacgtggcagaatgttgacaatgatggctatgcccacgagccatttgcaaccgccaacataatctatggggattcatctgaatggatttcatcttgggcctcattaggtcacctcatccacggccgcatcgaagcgcttgagcgcctagctacagagggaaaagccaaccgtttctctcgcaaaatggcatacacgatctttgccagtaacctagtcaactacgctgagaaataccgtggcatgcaatctgtggtgatgcatgaactagaagggtttgctgacgtgcaactgaccacaaaggagagtggagtctggacagttccaccatactttatcgacagtgtggtgcacttggctggctttatcatgaactgctcggatgccattgatacaaagaataactactgtgttactcctggttggaactcgatgcgattcgcgaagcctctgcttccaggagccaagtatcggtcgtatgtcaagatgattcctacagtcgaggatccgactatttacaatggcgacgtgtacatcatgcaagatgataccatcatgggtgtggttggtagcatacagttccgcagatatccgcgcatccttcttagccgctttttctcgccgccagacaagatggccaccttcgatgtcaagccaaaggggcaggtggctgcccccaaaactgcggtcccagcacaagatgcaacaaaatttgatgcaaaagtgtcactcccgatacttgctcgcggtgcatccgaacctgacagtgacgacaagcagggcaaccctcctgcccctgcactgcctgcccccgatgccgccgccccatctatcgttgaatccgcggccgcttccggcactacaactgcaaaggcaatcatgctcattgccaacgaggcaggcctagaactttctgagatgtcagacgacgcccttttcgttaatttgggaattgacagcttgatgtctctagttatcgcagaaaagctcagatcagagctagaagtcaaggtcagcggcagcctcttcttggactacgagactattggtgatttacggcagtggttggatgagtattatagctag

SEQ ID NO: 179 - DNA, 1014 bp, Pseudogymnoascus pannorum
atggacgccttcagagactctactcctcaggaatctgcctattccgcccctcaggttgccgcctggctcggtcgcatctccctcccctcatccctaacccaatacgtggattctccgtcagcctttcctaagacagccacatccctccagtcgctgttccgatgccagatcacaacctttccttacgagaatctctcagtgcactactcccagagccaccaggtcaacatccagccagatgtgctgtttacgaaaatgatgggcccggatcataacggcaggggcggctactgcatggaacttagcatcttcttccaccacatgctgcgcgggcttgggttccacgtctacatgacgggcgtgcgcaaccggacgcggactgacggcaagccgcagggcgaatatcaggggtggacgcacattaacaacatcgtccacctcccttgcggctccaagtttagcgccgacgtcgcgtttggtggtgacgggccgacgtctcctcttcctatggatggcatggcatctgcgcttcgcaatctaggaacccaagaggtacgcctcatacaggaaaacattcctaagcagcgccttcgggagccgaagttgtgggtgtaccagtatcgcaacagttctgataaggagtggaactcattctacagcttttctgagatcgagttctttcaggaggattttgaggttcagaattggtggactagcgctaagacactccatcggtggactgtgttagtggttcgatttctaagggagggtgagcccattaaattctctagagatggtgcctggaggaaaggagatgaccaagagataagcattgtcggcaaggtaatgctagtaaataacctggttaaggttaatgtaggggggaagacaagggttgtacatgagtttaattccgaggatggacggttgctggcactccaggagtattttgggattacattaacgcaggaggaggcccagttcatacaggggtgggacatggcgctaaaatag

SEQ ID NO: 180 - DNA, 921 bp, Pseudogymnoascus pannorum
atgcttgttcttattgccggaattactggaagccttggcaagcgccttgctgaaattgccattgcacgagggctgtctgtccgcggtttaggccgcaaccccgacagccttggtcctgaaatatcagaacatctggaatcctttgtcaaaagcgactcatactatgacatcccagctcatgagaaagccgtcgccggagtcgatgcggtgatcaatgcctattctccaatccctatgctagatctcgacggccaccttcttctcattcgcgccgcagagcgggcccaaattaaggtgttcgtcgcttcctcctggagccgtgactggaccaatatcaagttcaatgatttcgagcattacaacaaccatcttgctttcgagcatcagatcgcgacgaccagcaccatccgcccagtctacatacttactggtatcttcacagaccttctattcacgccttacgggcctggaggatttgatacgagcggcgacaggccgcgcatgcgctactggggcaacgagaacaccaagagcaaatggccttggagcacccaagacgatgccgcatcgcgcacaattgatattttgctctatggcgacggcgtccaagctgggaagggcggctttttcaaaattcgctctggagtgacgaccatcgaggagctcgcggtggtatacgagaaagtctttggggttaaagtcgacattactcgcgcgggtagcgtggatgatctcgagaaggaacttgctcggctgagagaggagaagggcaggactgggtatggtgagtacatggctgaagctgcagcattgattgcaagcaagggattgtgggaaaacagggacctcactgtcctggaccagtttaaaaaatccccaacgctcgaggaacacttcacggaagtgaaaaacaaggcctaa

SEQ ID NO: 181 - DNA, 2289 bp, Pseudogymnoascus pannorum
atgagcaccaacagcatcaagaaggcaagtagccgcagcaacagaggcccaaaatgggacgatgttaaaaaatgcgaaagactagttcctgaaacgtcaaaaaagccagaatcaggatctcttcccacatcgcagaatgtgaccatcgataccacgaactcccctggttctgaacatcctggtgtggcctcatctgccgtatcacctcaagcaaaaccgattgttacaccttctgcagaagacagggcagtttcagaggcaatagacgcaatagaggacctcacaaccgactttgacgcgaccagcactgaggcaggtcccagtaagcggacccaaaaagccaccgaaaagcgaaataggaaaactcttaagtcagacactactgctgcaatttctcaaaagaaagtgtctcaaactcgatctgttaacgacagtcccaataacaactaccaaggctcgttcccaaccgatgatgcttatgagaatagtcctgcatcatccgagtcatctctatggggggacgaccagtcatggaataccccaaactacctcagctttgatccagcaaggctcttggtatatcaaatgaaaccacagcgtaaaacaatgcgccagcggctttcttccataaagcagaaagccgttgagattgcaactgacgtggattgggtgaaagacgccatggccagcatgcgtatcaaaaccggcgcggaaagtcccagaaataaagagaagagtgccaaaaactcacgcaaggattcaaaggacacatttgatgtgatcttaagaggtgggttcggcgatattttgggcttgaacggcggaggaaatgatatttctggctttggtgaagggagcgatacctgttgtgctcagctttcagccggtttgggatcctcagtggttttcaattcaagcagcgcgtatgccaaatcacagagttcgtattgggcgttgcaacagtcagaactcatcccaagctgcattgttgtgccatcgacagcctccgaggtgtcagacgccatctccatcatttcaaccatcgaatcatgccactttgcagttaaaggtgcagggcatggaactgttgttggagctgcaaatattgatggaggagtcaagtttgatatgagccagctcaacgaaatcgagaccaactcagagggaactgtcgccagaattggagctggaagtcaatggggagaggtctatgagtatcttgacaacagaagcctttccgttgccggcggccggaacggcgatgttggcgtagctggtgtgctcctcggaggtggcatatcattttatggcccgcgagtaggctgggcaaccgataatatcttaaatgtcgaagtcgtgcttgcctcgggagagatcgtcaacgccaacgccacttccaaccaagaccttctgaaagctttgaagggaggaaacagcaattttggcatcgcaacatcatttgatctgcgcacatttcctcagggggaaatgtggattggttatctcggccaatccatcaatagtcgcgaggaagttttccaagctatcagcgatattgcgtcgaatgcaaataaggacccttttgctgccttggtgggcgatttcaagtttaattccgccaccaaatcttgggtcatgaaccatactgtggcatacacaaagccagttgccaatccgccaatctttcagccgttggtcaatattaagccccaattgagcaacaatattgcaatcacaaacatcagctctattgctctggggcagaagatgggcgccaaagttgcgtacaataagaatcacctgtcttacacaggcacatacggcaacgatgcagcacttctctccaagatttttgacattagcaacgccaccgtccacaagattatgccgcagatcaatggtggcatcaagtgggttacaatgatggagccatttccagcgcttgtagacagtttcggagaaaagaatggcggaaactcactcggactaagcgctgacactggagaccgtattgtcatcctacaattggcgcaattcgaaggccacggcgcgaacgacttggtcgacacggaactccacaacatgttcgatgagatcgcgagcgtggcgtcggagatgggactcttgcgccggttccggtacttaaattatgccgacaagcaacagaaccctatcgcttcatacgggccggagaatgtggcgcaattgcaagccacgagcaagaaatacgatccacacgggctgttccaacgacaagcgcctggcgggtttaagcttggaatgcagtag

SEQ ID NO: 182 - DNA, 456 bp, Pseudogymnoascus pannorum
atggctacgctggatgagtcagggatgcctaagttgtcagagtcgacaaaagacggctatctgtgccttaccgtttgtgggtaccgtaaaccaggcatgaacgaggaagattaccgcaattacatggtcaatgtcttagcgcctatggccagggaccttatggtgaagtacgatatcaaacgatggacccagatccacaatcaaagcgccactcgggatttaatgaaccagctatctgatcatcagatgaacaatattgcagacttcgactgtttcagccaggtggttttcaagagtattgaagacttcaagcgtatgaaacaagacccatggtacaaggagcatttaggcaaccacggaagttttgctgatacgaagcgaagcaaggtgacaataggctggattgaagaatttgtgagagatggtgaggtagtcgatggcttcaagatttgctag

SEQ ID NO: 183 - DNA, 2790 bp, Pseudogymnoascus pannorum
atggacgaggtgagatatcgcgaccagctcgccgcagccgtcaagagcctcatcgatagctgtcgaggagctgattcttccgaccaactggcggcaagcgctgatactgaagaaaacaaggactatgcttctttaaacagagccaggtcaagtattcttgccagtactgcagcaatcaagtcactagttgctgaaccaaaaaacttgcttcaggatttcgctcgtcagattgagatccttgccagtcttcggtggctagcagaatttcaggttttggcgtgcatcccgtttgacgaaagtttgcctgtcgaggacctggcagacttggtaggagttcccgagagccagctggtccgggttatccgtctgacggccacatgcggctttttacgagagccaatatcgggttttgtatcccacagcgctctctcggcacaattcataaccaatcagtctttacttgacgccactgtgtttattgccgacttggccactcctacagcattgcagatgccacaagcaacgcagcgctttgggaattcctcgagtgccacagatagcgcatacaatttggctttgaatacggtgcgaccgtttcatgtggctgtccaggagcgctctcggctgcgccgccaatggtcggcctacctttgccacgcagctgggttgcatcaagaagaagagatagttgacgttctatcgaagctcaactggtcaaaccttggaaatgcatgtatagttgaggtcggcgcaaagtcaacttcaatggcgggttctctttccaaaatgttcccaagcttgcgattcgtcgtgcaaattgacaacacaagatcttatttgttagatcaggactacgcgtggcagagtgcagttctaggaggctcgacccaagatagctctggctccgggtctagtccttcccccacaaaccctttcgtcacggtttcttatcgcgccatgggtatgcctcagtccgtgacagatgctgccgtatatataatccacattcctgtggcatcatccggattgacaattaaagcagagctggatgattatttgggtgttcttcgagccagcggaggtatcatgctcatcatgacggcacggttgcttcccgagccaggctcactctccaactcagaggctgagagtatggcgcgcgcacgggatctgagcatgctacatctagctaacgagggtgagatggaaatttccgatctcctgagtactataaagacggtgggggacagcgctgggaaactcgttgttactaatcacctacgctcaaacgacggcataattctagctttaaccatcaagtatcaagcttacattattcataagcctacattcgatagtagatcaccagcatttacctccgacacactcccgatcgttggctcctggaactattttacccagcacaaaaatttttggaaggactgcgtcgcagagtctaagaacggccactttagtttttggatcggcaagaaccatatcattggcctatctggcgcggctgctcgcaagatgtatctagacagccgcgatctcgatcctattggagggtctatgcttattgggcatggaccagacattatagatggtaaatcatccattatacctgccatctggacgactaccgtaaccggcgaccgtctctttgcccatcgccggcttctcgatttgcaaaaatcggaacagctcacgaagcgcctcgctcgtgtgaccaaggactgccgcgacacatttagttcaatgtctacaaactcgtttggggtcataaatccaactaagtcgtgctatcccattgttgtgaagcagtactctcgcattgtgggcgccgatgaaatctcgaataacccaaagatgctagaaaagctccaatattacatgcatatcctacagaccacttcaagtgtccatctccttgcttttccttggctgtcatactttagtgtggcctattggaaacgtcgctatggccgttgggggttttctaacattgtgacgcctattgtcaacaagcgaatgatgaagggcgcacttcgcgttgatgatgcgctgcaacttcttattgataatggcgacagcaaaacctatattatcgacttcctcattagcatgttatttatcgccggtgccaacgccactgttttaaccggtgccatgctaaatatcatcgcccaccacccagactggcaagagagaatataccgtgagattaaggctaccgctgcatcccactcaacgaacaaaggtgcatcattggtagaccaactcgactcaatgccattgtccgcctgggaatcactttctcagtctcttgaactttgtttcaaggaaaccatccgcatgtgggctgttttcccagtaagtcgcagaaatatcaccgatcatattataaatatcgcaggaacacacgaggttatcccacctggtggctatactgcatatcatagcactgatgtacattataacgaaaacctctacccggatccgatgagatgggacccggaacgcttttgcgatggtcgcgaagagtttaaaaaggaggattatggatatattggttggggtcagggacgtcatccttgcattggcatgcgttgggctaaactccagcaaaatataaatatcgcctatcctctagctatgtacaagtggagcggctgcgatgagaatggacagcccaaccctaactttgcacataagccaacagtaaacagaggcgcccccactctgccgatgggactttactgtaaatatgttccgcgaggagatacataa

SEQ ID NO: 184 - DNA, 1020 bp, Pseudogymnoascus pannorum
atggatacttttactatgaaaaaggacaaaggtggttacaggcagattaataaatcgttgaatatctgtgccttcgatgagtaccttcggggccaaactgcgcgactaccgcatatagagagtgttgaacagctcactccgagagtacttcgcattctcggtcagaacccgggaaagttcacgcatcaaggaactaatacatacatcgtcggcaccggccaacgccgactcattatcgacacaggtggcggccagcctgaatggaccgaactaatcgcgtcgacttttaaatcaatgaacataagcttatctcatgttctgttgacccattggcacggtgaccacactggtggtgtctcaggtttattgcgcctgtatccgtatctcacggcttcgatctacaagaacgagccgaatcagggccagcagaacatcgctgacggacagatattctccgttgatggcgcaacaatccatgctatccatgcacccggacattcagaggaccatatgtgttttatcctagaagaggagaatgcgatgtttaccggcgataatatccttggccatggtactagtgctgtagaagacctaggcaccttcatggccagcctcgagaagatggccgcccagaattgtcaaatcggttattctgctcatggcgctacaatcgcaaacttgccagcaaagattgctggagaattagaaagcaagtggcgacgagagaagcaagttatgaaaggactggcgcgagttcgcatccgtggcgagaaaagcgccaccgtcagggacctcgtaactgagatctacggcggttcgctagacaaagacacgaggacgctcgcattggaaccatttattgatgaagtgttacggaagttggcggatgactccaaggttgcttttgaaatgagaggaggcaagaagaagtggttctctgtggaggaggtggaacaaacaaccacctggcggttcacagccacgaataaaagttcaccagctgtacctgttcaagtttga

SEQ ID NO: 185 - DNA, 5415 bp, Pseudogymnoascus pannorum
atggccgtgcttaccccaaccacggattcggaatccgacgaggagtctcgtaagatggaagttgtctattttaacaatgagttctcaaaggaggacctgcaggatgttttccgccgtctacacaaccacagcaaggacaaacattaccccgtcttgacccagttcatccacgaggcctcttgggttataaaggacgaagttcggcaactgccgactgagactaagcagctgattccgccattttctaccctcctggcttgggtggagaatacccagcttcgggaaggactactgtgcagcgccgtagatggagtgttgctcgtctttgtccagctcgcagcttatattggatatgtcgagagccgctctggagatttgcctgattttccaactacatatcttgctggtctgggcaatggcctactatcatcaagtgccgcctcattggcacgaacattgggagatctgccattggcctgtgccgatgcggttcgtctcgccttccgactaggcattcactctcttgatatttcagagaatttggaagcccgcgatttatcagaaagcccggatccatgggcgtatattgtccacgacatagatccggctgcggcttataaggagctagatgctatacattcccgagacgagacccctaatacaagcaaaatatttgtcagtgctgtcagccggaattctgtcacaattagcggaccaccttcgaggttaaaaacgctgcttaataagtcggagtttttccgtgagtcgaaagtcgtcgcaatgccagtatacggcggtctctgccacgcgccgcatatattcggtctggacgatgtacatagtgtcgttcatggctgtgcattaaacgccacggccacaagttctccgccggcgatgccggttttatcgacgggtaccggtttgccgtacctggcaaagaattctgtggagatgttcgaaggtgtcgtctcagaactattcacgaaaacaatttgttgggataatgttgttagcggcatagtagaacgagtcaagaccaacagcaccgcggaagtaatgcttcactgttttggtaattctacccctcttaatgatctcatagttgcattgaagagcaatgttccaaatgtcgatgtctcgaccaataacctcatgatgtggatctcgcaggttgttccaagagatgctaccccccgcggcaccgggcagtcaaaactggctattgtaggtatgtcatgcagacttccagggggcgcgacaaacaccgagaagttttgggagatcttggaaaatggccttgacgtctcgcgacgaatcccagctgaccgcttcgacattgatacgcactacgaccccactgggaagcagcagaacaagaccatgacacagtacggctgctttattgatgagcccggtttgtttgacgcacccttttttaacatgtctcctcgtgagtctcaggtcgtcgatccgcagatgcgattagctcttgtcactgcatatgaagcactggagcgtgctgggtatgtcggtaatcgtacggcttccacacaattacaacgcataggaacatattacggacaagctgcggatgattaccgtgaggtcaaccaaggtcaagatgtcggcacgtattatattccgggtggttgccgtgccttcggtcctggtcgtatcaattacttttttaagtttgcgggacctagctatagcattgacacagcttgctcctctgggctcgcggcgattgaagttgcttgtcaggctctttggcatggcgatattgatatggccgtcactggcggtgttaatatattgactaacccggacgggttcaccgggctatgcaaaggctatttcttaaccaagggtcacaacgcttgcaagacatgggattccactgctgatgggtattgtcgtgctgacggaatcgggtctcttgttattaagagactcgaagacgctgaggcggacaacgacaacatcttgggggtcatccttggagcaggaaccaaccattcggccgaggccgtctctattacccacccccacgctggccatcaagcatatttatcccgtcaggtgcttcggcaggccggcgtggatccattagacgtgtcatatgttgagcttcatggtaccggtacacaagctggcgatcacgaagaaatgcagggcataatggaggtgtatgctccactaataaggcggcgccggaaggatcagcctctgcacattggagctgtcaaggccaatattgggcatggcgagtctgttgcaggcacagcggcattaatgaaggtgcttctcatgctgcagaaaaattccatcccgcctcatattggtatcaaaacggagatgaatcccagattcccccgagactttgacaaacgcaatctccatattgacttggagatgacaccttggccccgaattccgtctaagaaacgactggcggttgtcaataactttggtgccgctggcgggaacacaacaatggttttggaagaggcaccaactcgtgtcctatcggaggcagatccccgcagtactcatatcatcgccatttcagccaagactaaagcatcgttggcaggaaatatggagcgtttgcttgcctatcttgatgaacacccagatattaaccttgccgatctttcctatacgacgactgcgcgccgtactcatcatacccatcgtgtagcaattacaacttccgacatgggtcacctgaagaagcagttggctgttcgcctagggaatgtcgattcgataaagcctgttgatagttctggcccgccaccagttgctttcacctttactggccagggttcttcctacaagtcgatgaatctcgagttataccgtgacgtgccaacattcagagagcacattaagcatctcgactctatcgctcaacgtcaaggctttccatctattgttcccgctctcgatggctcacatcccaaagagcacgcgcactttcctgtcgtcactcaacttgccttggtctgcaccgaaattgctttggcaaaatattggatttctctcgggatcaaaccagacgtcgtcatgggtcatagcttgggtgagtatgctgcaatgcatattgctggcgtggttactgcaagcgataccatattcatggttggacgtcgagctcagatgctggaagaaaaatgcaatattaacagccatagcatgatcgcagtccgggcttctctacaaaaaatagcagaaagcttgggagaaaagccatacacaattgcttgtgtcaatgggccttcagatactgtgctcagcggcaccaaggagaatatggatggggtcgctgagttactcgaggctgccggttaccgctgctttaagctggacgtcgcgtttgctttccactctgagcagactgatcctattttggatgactttgaggccatctcaaagactggtgttgcctttcgtgagccgaaactaccagttatctcgccattactcggaaaggtgatttttgacagcaagacgctaaacgcaaactacgtccgccgagccaccagggagcctgtcgactttttgtctgctttagaaaatgctcaaaaaatctctaccattagtgatgaaactgtctggatcgaaattggaccacatcctgtctgtactaactttgtcaaagccactatcccgtccacgaaacttgccgtctcatcgatgcgccgtggagataataactggaaaacaatggctgagagcatggcttccatgcatcttgctggattcggggtcagctggaacgaatttcaccgcccatttgaaaacaggctacgccttttagatttgccaacatacgcttggaatgacaaaacctattgggtgcagtataatggcgactggtgcctaactaagggaaatactttctacgacgctgagaaagaggctgccagagtaaaggctgcgacaaagacgctacctgcgaatgagctttacacgacaaccgtgcagcaaatcatagatgagagtttcaacggtttctctggcacagtggtgattcagtctgatcttatgcaaccagacttacttgctgctgctcatggacacagtatgaacaactgcggcgttgttacttcttctatccacgccgacctttcctataccctcggtgactatatataccgcaagatataccccaaagccaaggacgtcagcatgaatttttcggacctggttgtcacaaagggacttgtcgctcaaactaacaaacaaattccccaattgttccgagtaactgctgtcgccgccgatgtccgctcaggtgcggtcaatttgacgtggcagaatgtgaataatgatggaactgcggacgagccatttgcaactggtaaaatactatacggagattcaactgagtggatatcatcttgggccccatttgctcacctcatccatggtcgcatcgaagcgcttgagcgcctagccgcagaaggaaaggctaaccgcttctcgcgcaatatggcatacactctctttgccagtaacctagtcgactacgcagagaagtaccgtggcatgcagtctgtagtgatgcatgagttcgaagggtttgctgacgtgcagctaacaacgaaagagggcggagtctggacagccccaccgcacttcattgacagtgtggcgcacttggctggttttattatgaactgctcagacgccatggatacgaagaataactactgtgttactcctggttggaactcgatgcgatttgctaaacctctgcttccaggagccaagtatcggtcgtatgtcaagatgattcctacagtcgaggacccaacggtttactttggcaatgtgtacatcatgcaagacgatgccatcatgggttttgtcggtggtattcagttccgcagatatccgcgcatccttctcagccgttttttctctccgccagataagatggcctccttcgaagccaagccaaagggacaggtgacttcttcaaaaactacggccccagcattggaatcaacaaaaactgttgcggtagaatcaaagccggtcctctctggcggtgaatccggccttggcagcgacgaaaagcaggggaacgctcttccttccagctcctccgcccccacgccacttgctcccgaggcctcggcgccatctatccctgattctgcggcagcttccgatactacaacggcaaaggcaattacgctcattgccaacgaggctggtctggatcttgttgacatgactgacgatgccgttttcgctaatttaggcgttgacagcttgatgtcgctggtcattgctgaaaagctcagaacagagctagatgtcaaggtcaccggtagccttttcttggactatgagacaattggcgatttgcggcaatggctggatgattattatagttag

SEQ ID NO: 186 - DNA, 2298 bp, Pseudogymnoascus pannorum
atgaataccaccaacattgcccgtggggcaaatggacacgtcaaaataagctcgaaatgggacgagattacagctgtcgaccgagaaacgtcagaaaagctacgattggggcttctaccctcgtcgaagaacatagacatcaatattctaaactctcctggtattgtatatcctagtgtatgctcttcttccgctgtatgtcaagtaaagactgtcactacaccctctgcagaagacatagcggtttcagaagcaatagatgcaattgaagatcttacaagcgactttgaagctgtcacagatgagagcaataccgaggaagttccaagtgagctgactccaaaggtcaccaaacggaaaaatacacgagtttccaagctaaaatatgccgcggaaccttctcaaaagacccaatggccccgaacctggttaggtaacgacagcctgtgcaacgacaagtctagtcccaagaccatcgaatacggctgcaagaatagtcccgcatcatctctgtggacagatagcgaatcttgggatactccaagcttcctcagatatgatgcagaaaggccctcacggtatcgatttgtgcggccgcgcgaaacagttcgccagcgagttacttcactgaagcataaagttgttgaaattgcgagaactgatcttggctgggtgaaagaggccatgggcaacattcgtaccaaagctagcccggaaaatcccaaccatagagttggaagtgccgaaaactcacgcgagagttcaagagacgactctacttatttgagtctgaggggcggagcgggcgatatttcaagcttgaacggagcgggaaatgacatttttgggattggcggggggactggtgattgttgtgctcaactttctgcagagttgggatcctctgtgggttttgaattgagcagcatctatgccaactcgcagagttcgtattgggcaaaacaacaatcggagctcactccaagctgtattattgtgccttcgacggcgtctgaagtcgcggttgccatctccatcatttcaacaatcgagtcgtgcaacttcgcagtcaaaggtgcagggcacggaacagttgtgggagctacaaatatcaatggaggtgtcaagtttgatatgagccgcctgaacgaaattgagaccaactcggaaggaactgtcaccaggatcggggccggaagccaatggggagaggtctatgagtatcttgacaacagaggcctttccgttgctggaggtcgaaacggcgatgttggcgtagctggagtgctccttggaggcggaatatcattctatggtccccgagtaggctgggcaacggataatattttgaatgtcgaagtcgtgcttgcctcgggagagattaccaacgccaattccacttcaaaccaagacctacttaaagcattgaaaggcgggaacagcaacttcggtatcgccacattatttgatctgcgcacattcccccaaggtgaaatgtgggtgggttatctcggtcaatccattgatagccgcgatgaagtttttaaagccatcgccgatatcgcgtcaaatgccaatgaggaccctttcgctgctttggtgggcgacttcaagtttaattccgccaccaaatcttgggtcatgaaccatactgtggcatatacaaagccagttgccaacccgccgatatttcagccattggttaacatcaagccccagttgagcaacaacattgcaatcacaaacattagcaccattgctacggggcagaagaatggagccaatgttgcttataacaagaaccatctgtcttatacgggcacgtacggaaatgatgcggcgcttctctccaagattttcgacatcagcaacgccaccgttcacaagataatgtcgcagaccaatggtgggatcaaatggacaacaatgatggaaccatttccagcgctggtggacagctttggagataaaaacggcggaaactcactcggtttgagcgcagagactggagatcgtattgtcatcttgcaattggcacaatttgaggacagagatgcgaacgacatggtcgacaaagagcttcacaacatgtttgaggagattgcaaaagttgcatcggaaatgggactcctccgccgctttcggtacttgaattatgcggacaagcagcagaaccccattgcctcatacgggccggaaaatgtggcgcaattgaaggctacaagcaagaaatacgatccgaagggtttattccagagacaagcgcctggtgggtttaagcttggaatgcagcagtga

SEQ ID NO: 187 - DNA, 2097 bp, Pseudogymnoascus pannorum
atggttgcccctcctccagactgggtcgcgaagttgacgccctccgggccgcagggcagtgagctccttgcaacggagcgtgcgaagagtaacatcaacgttgagaagctgtccaacttcatgttcggcaaggaggcgctggagaacgaggccaagatcctggctatcctccagtccgagaaggtgttcgacaagtcgaacaatgccttcctgggaagagtggagaagttcccggttgctctcgccagagcgaagaagctgagacagctgcaagtcaagcacaactggagcaccgaggactacagaatcgccgatggcctgatctccgagccaggcccatacgggcttcacgcctctatgttcttgactgctctcagagaccaaggaacttcggaacaacacaagctcttccttgagccggccgagaactacaagtacatcggctgctacgcccagaccgagttgggacacggctccaacgttcgtggtcttgagaccaccgcgacctgggaccctaccgacaagaccttcgtcattcactctcctcatcttaccgcctccaagtggtggattggctctttgggccgcaccgccaactacgccgtcgttatggcacagcttattctcaacggcaagtcctacggaccacaccccttcgttgtcccagtcagggacttgaagactcaccagccccttgacggcgtctacgtcggagacattggaccaaaattcggttacaacaccatggataacggtttcctcctcttcaacaaggtcaaggtaccccacgtcaacatgttggcaaagtactccagcgtcgacccaaacacaaacaagtatgtccgcccagcagctgcgtcgttggtttacggaactatgacctgggttcgctccaccattgtgcttcaatccggccagaccctggcaagaggtgtcactatcgccaccaggtattgtgctgttcgcaggcaattccaggaccgcgatgacatctccaacgatgtcaccgagaaccaagttctcaactacagcatggtgcaattccgtcttctccctctcctcgcttccaccttcgctctccacttcactggcaaggccatgatggaaatgtacgcacaaaaccaagagaggatgaagaaggctgttgccaacaccaggagaggagccggcccagaggagcttcagtctggcagtgatatgcttgctgatctccacgccacttcttgtggacttaaggcgctcggcagcaccatcgctgctgagggtctggaggtgtgcagaagagcttgcggtggccacggttactcccagttctctggtatcggcagcttctacgccgattacctcccaaccaccacctgggagggagacaactacatgttgacccagcaagtcgcacgctacctcctcaagattgcccgctccgtcctcaagggcaaggcacccgtcaacgacaccgccgagatcttccgcacctacttggacgcacaggacaagggctgcgccttcgacatcctctccaacgacggcgacatcgtcgcagccttcgcatggcgcacatcctacctcaccttcgaggccctcaagcaccgcgacggcgagaagaagtcgtggaactccctcctcgtcgacttctggcgcctgtccactgcccactcgcagtacctcgtcgtcaagaacttctacgacgccctgcagtcctcgtcgctcacctacgagctcgactccgtctccatcaccaccatgcaccagctcttccgcctcttcgccctcagcaccctcgagaaggaggccgccgagttctactcctcctccgccctcacagtccgccagatccagctcgtccgcacaaagtcggtcatgcagctcctcgccgacatcaggccgcacgccctgcgcctggttgacgcttggcagttcccggattggcagctcgacagcagtctgggccgcaaggatggtaaggtctacgaggatatgttccacagggccagccagctgaacccgctgaacggtctgaccgtggacccatacccagagagtgatgtgttgatcaagagcgatgagacgaaccgtgctttgcaggcgaagttgtag

SEQ ID NO: 188 - DNA, 1917 bp, Pseudogymnoascus pannorum
atgtccgaacctcagagcaatccctctatcgagttgaagagcgtggccccagacactttctcatcggattcggagagggggtttgagcacaatgcgcaattgaaaaacactaccgtcaagcatttcatttggcaagatgtcacggtcacagtgcaggaccgggccacaaagcagtccaaggcaatcttagagaatctgaatggagttgtctcagctggcgagatgtgtgctttgatgggcccgagtggttctggaaagacaactctgttgaacttcctcgccagacgcgacaaccctggagctgatgccaccggctttgcatctgtaaatggaaacgccatatccctcaatgagttcaggaaaatgagctcctacgtggaacaagaggatgccttgattgggtctttgacggtcagagagactatgaactttgctgcacgcttgtcaaactctggcctcacaaagaaggatcgtatcatgagaatcgatggcttgattgattcgtttggtcttcggaaacaggaacacactatcattggcacgccaattcgtcaggggattagcggtgggcagaaacgccgtgtcagtgtagcaagccagttgattacggcgccaaagatcttattcctggatgaaccaacaagcggcctcgactctgcggctagcttcgaagttgtttctttcattaagaccttggccaagcaaaacaatttgatcgtaattgctagcatacaccagccgtccacgcagacgttctcactattcgataagctgctcctcctgtcagagggtaaaccgcactattttggagctgtggacgatgtggttccatactatctggagatcgactacccggtgccattgcatatgaaccccgccgaacatgcattagaattgaccaacaaggattttggatcgggcctggtcgaggcagaagaagatttatccaagctccagtcagcctggtcttctaatccacgtgccaaagcgattgccagccagatcaactcctatctcatcactgccagcgagggccaaacacataattcgaagaccggctctcatgcaaactttgccgcggtcacattgaccctcgttcatcgctcttttatcaagtcgtaccgcgatgtcgtggcatacggaattcgcctagcaatgtacagctgtcttgctatcatgagcgggacggtttggctacgcctaagcccttcccagacgtccattcaacctttcatcaacgccatatttttcggagcttcgtttttatcgttcatggctgtcgcatacgtgccgtcattcctcgaagacaggttaacttttatcaaagagcgctcaaacggcctctatggtgccgctgccttcacagttgccaatttcatcattggactcccatatctgtttggcattgcactcatatttacgtgcatctcgtactggctgaccggcttccataataccgcccctgctttcttcacattcgtcatgtgggtattccttgacatggtagccgcagagagcttggtagtcctaatgtcctcgatctttcccaacttcgtcgtcgccctcgctctcacagctttcgtgaacggtctgtggatgtgcgttggcggcttcctgatttccacgcctctcttgaacgtgttctggaaatacgtgttccactacatcgattaccaagcctatgtcttccaaggattgatggtcaacgagtttgccgaccgcacgtacaactgtgaccaggactgtcactgcatgtacaccacggaactggcctcacaatgcatgatctctggaaagggagtcttggacacgtttgggatgtccaccggcctgacaggcacgtgggttgggatcttaattggaattgtagcagtgtatagacttcttggatgggctgtgttggcactcaagcgttaa

SEQ ID NO: 189 - DNA, 6342 bp, Pseudogymnoascus pannorum
atgcagccgcaaacagaaattatggcttcttgccaagtcctactttttggtgacttggccattcgtttcgaagatgagcttcgccagttagttcatgtcagggggaatgagagtctccgttcatttttcgatcaagtttgccatgcacttcgacaggagtttggggatcttcctggcagccagcaggaccttttccctcgatttactacgcttgtcgatcttgtctccaagctcgcagagacagagggcacccccgctttgagatttacccttcttccagtttgtgaaatcggccaatttattagatactatggggaagggtcaaggccgtatcctagtgccatcgacagctactgcttggggctctgtgcaggtgggtttgccgccgcagcagtcagtacatcccagactttggccgagttgatcccagcaggagtcgaagcagttctggcggcgtttcgaacggctctctgctctttagaagttcgtaataatatagaaggaccgagccttgagagacatcgatcttggtctgctgtggtcaatgctccggaaaaagaagcttctgaattaatccagcggtttattttggataagggtctcccacacagctgtaggccctatttgagcgcaataacaccgtcgaatgtaactatcagcggccctcccggcgtcttaaaagagttctttgcagaaagttcactaaagttttaccacatacctgtcgaattaccataccatgcccctcatcttttcgagccacgcgacgtcgacgaaatcatctgccgattcgatgacaaattatttggttcgtacaaaccacgaattcctatttggtccgcagcatctggaaaccccattgcagccgaaaattttaagactctgttgcataaagttgtgacggacacattacgtgaaccagtacagtggacgagtatcctcgaatcaagcgccaaacacctcggacataggaattttcaagaatgcacaataaacgctctatcatccaatgcctcctctctcctctcttcggccatatctcggagcaccaaaattcttgtcgccgttaatgacttggcttcgaaatctggatcagtaccacagcctcggagacacagtggccgtttagaccaatccaagattgctatagtcggttattccggtcgttttccagactctgcgtcaaatgaagaattttgggaattgctgcgcgccgggaaggatgttcatcgccttgtccctgaggatcgttttgactgggaagcacactttgaccccactggaaaggccaaaaacaccagccgggttaaatatgggtgcttcatcaaggaaccagggctatttgatgctcgcttttttaacatatccccaagagaagccgaaaacacagacccagctcaaagattggccattacaactacctatgaggcgcttgagatggcaggaatggtgcccaatagaacgccatcgacacaacaggaccgcatcggtgtcttctatggtgttactagcgacgactggagagaagttaatagtggccaaaatgtcgatacctattttattcctggtggcaaccgtgcatttgttccaggtaggattagttacttttttagattctcgggccccagtctcagcatagacaccgcctgttcctccagctttgctgctattcaaattgcttgcagtaatctgtggagaggcgagtgtgacactgccattgcaggtggaactaacgtcctgacgaaccccgacaattttgccggcctagatcgaggccattttctgacaactacaggcaattgcaatgcttttgacgatgaagctagcgggtattgtcgcgctgacgctgtgggatccgtcattctgaagagactggaggatgcccaagctgataacgaccctattttcggtgttattgccggggcatacacgaatcattgtggccaaacggattccataactagacctcatgaaggcgaccaaatatcagttttcaagcgaatcattcgacacgcaaacgtgaacccgctagatattagctacgtcgaaatgcacggaacaggaacacaagcgggagatgcgacggaaatgaattccgttttatcagtcttcgtccctgaacgtgaacgaatgccagattatccgctctacctaggctcagccaaagccaatatcggccatgcagaatcagcatccggagtctcttcccttatcaaggtcttaatgatgatgaaacacaatgaaatacccccccattgcggaataaaaacacggattaaccacaattatccactcgaccttacagagcgaaatgttaatattgctgccacacccatcccttggcatcgcacagcgtcagggaagcgctctgttttcttgaacaatttcagcgccgcagggggcaacacagccgtactcttggaagatgccccttttgcaccacattcaaacgatattagaagtgactctcgcagcagccatctcgttgctgttactggcaagtcggcaaagtcactaaacaacaacatcaaggttcttattgactttcttcagctgaatcccgaaactccgctgcctgcactgtcttacacgacgactgcgaggcggatgcactattcgtacaggacaatatgttcaggatcagacatcaaatttatcatagatgcattgaaaaaagctgcagattcggactcgaagccatctccaagcaccaaagttccaaaaatagcattcgctttctctggccaaggcagcctctattcaggcattggaaggcaattattcgagtctcaccctagctttaaagcggatatacttcgctttgatagcatagcgcagcaacaaggattcccaggctttttgcctttagttgacggtactgcttcggatgtagatggtgttgaaactgtcgcagctcaccttgccctcagctgcgtgcaaatggcgatctgtcgcctttggatttcttggggagttcgtccaaatttaacaattggacatagtcttggagaatatgccgcactacaagttgcaggtgttctcacacccagcgacgtcatatatcttgtcgggaccagggcccagttgctggcaagatattgcaaccaaggaacccacgccatgctgtccataaaggcatcgtcggatgatttaaaaacctatctgtcaggatcaacctgtgaaatagcttgtatgaaccagcctacaaataatgtaataagcggaccgaacgaggaggtaaaccgtctaatgcttttgtttcaatcgaagggttatgaatgcattaagcttggaatcccctttgcctttcattcagcccaagtggatcccattctagaggaatttgagtctgctgcaagcagcatctgttatcatgccccgacgttaccgtacatatctcctttactcggattggtcgtctcaggcgaaggagaactgaacgcatcgtatctgactcgggcatgtcgaagagcagtaaactttcaaggctccctaaagtcagctgaagcggcctctgctattgacagtcatactatctggattgaaattggatcacaccctgcatgctctggtatggtcaaaggaacaatcggtccacagtcgacgacaattccatcattaagaaagggcgttgatacgtggaaagtccttactgcaggtctcgaaacgctatacctcagtcgcgttaacatagagtggaatgagtggcatcgacattttaagagctcacacaaagttctccaactcccaagatacagctgggacttgaagaattactggatccagtaccgaaataacttctgtcttaccaaaggagaaggcacatcagccaatgctgcgcttccggtcgacacgaagcccagctatgcttccctgtcgccagctgtccaacgtgttctggaagagcaccatgctgcagacgtttccaacatcctcgtagagtcagacattcaagatccgcacctggcgcctgtgcttcaaggccataaggttaacggcgcttccctctgcccctcgtctctttacgcggatattgctctgacacttgccaactacatgatgaaggccgtcaatatgcaaggtagcgagataggccttgatgttgctgacatgaaagtcgacaagcctctcatagcacttgcggccggtgatccacagctgtttcgagtttctgcgtcagctaattgggcatcaaaaactatttcactagcattctacagcatcaatggccagggtgctaaaaaggcggaccatgctaaatgccttgtcaaactcgcctcgaaccaaacttggcttcaggattggaagcgcaatgcatatctgatcaagagcaggattgctgctctacacaaaggtgtcgatgaaggcgaatcacacaaactgaagcgcggacttgtctacaagctatttggggcaatagtagactatgatccgcaataccaaggcattcaggaagtaattttagacagtaatgagcttgaagctacggcaaaggttactttccaggtcggcgacggaggctattgtttcagtcctcattgggtagacagccttggacatattgctgggtttatcatgaatggcaacgacaatgttgagtccaaaagccaagttttcatcaatcatggttggagcgcaatgcgctgtgcaacgactttcgcatatggcaaaacttaccagacgtacaataagatgcaacttgtagaaggcacattgtatgcaggggacacatatattcttgaagaaggaaatatcgttgctattttcgaaggcgtcaagtttcaagggattccaaggagagttctagaccaggttttgccctcgaagcccagcacagtcaagaatgcagcgccgcctcaaaggccggtggcgaccactacctctgtctcagcggcaaggcaatcgccaaagtttccaacagcacctgatgtaactcttgtcaggccgccatcaaatgatatcatctctcaagtcatggcaatagtctcggatgaggcccacattgacccatcagagctcaagcccgagaccgagtttgcagattttggcatcgactcccttctctctctgacaatattgggcagattacgggacgaggctggacttgacctgccatctatgcttttttcagactatccaactgtcgagaagctccgaaatttcattggtgtggaccaaagcccgtctctgtcatccgggtcgtcgagtcaagatgatacagaggtgttgacatcagaagtagcgtctgagccagatacctataggcttgctgatatcatccgcaatactatctcagaggagactggggtccccattgaagagctcaccgtctcagccaggctctcggaacttggtatagactctcttcttgcattgacaaccatgggcaagctcagtgaagcccttgatatcgaggttccacagttgcttttcgtcgagaacgacacattgcatgatcttgaaagggccttggatatgacagtaaagcacacacatgtcaaaatgtgccccaatgtcgccagacttcaggccattgagcaagtcaacgtcgactcacctccatacgcaacctcggtcttacttcagggaaattcgaaaaccgcaacaaaaaagatctttctgttccccgacggttccgggtctgctacttcatacagctcccttgctcgcgtctctcctgatgtcgctgtatacggactaaactgcccgtggatgaagacaccagaagatatgaaggtcacgctcgaacaattgactgccaagtacctccttgaaatccgacgccgacagcctcatggcccctattactttggtggctggtctgccggcggcatatgcgcctacgaagcagcacagcagttgtctcgcgatggcgaggagaccgcgcgcctcatactcatcgactcgccgaacccagtaggcttggaaaaccctcctcagcgcatgtacgacttctttgatactctcgggatctttggggaaggtggcaagccgccgccaagctggcttcggccgcacttcgacgcgtttattcgactgctggacgactacaaggttgaagcttttgcgagcaagtcgatggaaacgcatatggtgtacgccagagatggcatctgcaaactgcctactgaccccaggcctgagattcgtcctgatgacccaagagagatgctgtggttattgaataaccggactgacttcagtggtagtggatggtgtgagctcgtaggaaaggacaatatgaagatcacggttttggataatgtgaatcacttcaccatggtggaaccgggaccagagatttccaagcttagcaattttatcagaaaggctatggagtga

SEQ ID NO: 190 - DNA, 1482 bp, Pseudogymnoascus pannorum
atgaccgaaccatcgcccccggagaaaagttcgccacagtcgccttctactgctgcgcatgttactccaaatgcttcaagtgaaggcgcgattgtcgacttcgatggcgctggtgatccagcgaacccgttgaactggtcgttttcaagaaaagtggttacgagtggtctctacagtctgacaagccttggatctgtgtgggcaagcacagcatactcccctgccaatagcaaggtcgccgatgagtttcatgtgtcaccagaagtagctatcatcgggacgagccttttactcttgggctggggatttggaccgttactctgggcgccgctgtcagaagtttacggccggaaatggccagttttgatcccattcttcatctctattgtgatgtcatttgggacggcgacggcaaaggatatccaaacgattctgattactcggttcttcaccggattctttggggctgctcctatcacctgcacaggaggagtctatgttgacatctgggatgcatcccaacggggaaatgctattgttgggtacacgctcgccgtgtgtggaggtccggctcttggacccgtcattggaggcgctattatttacagcggcacaaattggagatggactgaatatactacaggcatattgcaagcctcgatacttattccaggagtaatattcatcgaagaatcatacgtaccaatgttactcgtcagaaaggcacgcaagctgagacagaacacgggaaactgggcactgcacgccgagtgggaagaaaccggtgtttccatcaaggcactcgccataaagttcggcctacgacctcttcagatgctattgacgccaatttgcctctcggttaccatctactcatcatttatatacggcacattttatgccagcctggcatcgttccccatcatcttccaagaaacgcgaggctggaacgagctcgtcgggtcgcttccgttcctcggagtgcttataggaatcattatgggcgcagcactcagcgctctgaaccagaaatactacaacatcgcgtacgaagctaacgacttcaaaccggttccggagtctcgcctcccgccaatgatgattgcttcagtcgttttatcgggcggattgttcatcatgggatggacttcttcccccgacctcccgtggatagcaactttaataggagtcactatgatggggtttggatactatacgatttttaccagcgccttgaattatctcgtcgatacattccagcggtggggggccagtgctatagccgcaaatacgttcatgcgaagtgtgctcgcggctgcattcccgcttattgtcccgccaatgttccgacgtctcggaaatgaatgggcattaagtgtgctcgccatcttctcggtgtttaatatcccgattccgttcgtcttttggttttatgggcctcggatcagagcgatgggcaaatacagctcgaatatggggtag

SEQ ID NO: 191 - DNA, 1422 bp, Pseudogymnoascus pannorum
atgcggccccggctcccattcgacgatgttgcttgggaacaaagtgacaacgtttacgaagaatggcgaactaagcttctcaaaccagaaaatctaacggaaatcgctctttttgttgcaaagtatcaccttgggacgccagtgaaggttagaacgcctcttacgggcgcctataatgtggcggtggttgttgattttcgcggaggtggttcgacattgattcgctttcccaaaccaggtaggctgatgtttcccgaggagaaggtcaggaatgaagtcgccgtaatgcggtatattcaagctcatacgtcgatcccggtgccgtttatattgcactggggcacgaaggaacagagtccttgtggtctagggccgtttattattatggaatatgtcaatcatgactgtgatatcagtgacgcgttgaatacgccgggaataccatctgaggaccgaccaattcttgatcctgctgtagatgaaggaagactccggaaattatatgggcaaatggcagatgttctgcttcaactatccatgttgtcattccctaaaatagggtctctcactcaagacgacgatgaagatactttgactgtggccgcgagaccattgacggcaaatatgaacgaggtcgtacagctcgggacattgccacgttcaaagctacctgataaaagtgcagcctttgaggcttcttcgtcatacctgactacactagccaatatgcaccttcgccacttaacctaccagcgaaacgacgcgattgtcagcgcgagcgactgctgccaaaaatatatcgcaagatacctcttccgaaagctttccgttgaaggcaagctgtcacgtcctgagcacaatttcgggccttttaaactctggtgcgatgatctgcgcccagctaatatgctaattaattccaacctcgagttggtttccattattgacagggaatttgcatatgctgctcccgtggagttctcacatgcgcccccttggtggctcctaatagaacagccagagcactggtcggaaggactttacgcatgggctactgcttatgaacctcggcttcaaactttcttggccgttcttcgcgagcgtgaagatgtcctcatagacgagggaagacttaaagaccaggagagactctcgttgcctatgcgggagagctgggacagtggtgatttctgggtcgtatatgctgctcgcaagggctttgcatttgatgcggtattctggaagtatctggatgcacgcttctttggggctgtggatggagtggaaggggatgagtgggaaaggagagccgagttgctggacaaggaggaacttatggaaattgacagctttgtcgatcaaaaagtggttgaaatgaaaacccgagccttagcatgggaacccgaagaacatcttggataa

SEQ ID NO: 192 - DNA, 1359 bp, Verruconis gallopava
atggaggattcctttatcctgaagaacgtttcaatatttacaggtgatgactggatagattctggttgcatagcagttaggaatggcataatcaactacgtgggccgcggggatcctccagctcgaatagtacccgagggcactgcagttctctcattgccgcggagaagtgtgattcctggtctcatcgattcacgagttcattgtcaggaaggtaacattgaatgtctcgagcagtcgctgagattcggcgtgacgactgtctgcgacatgtatggcgaccctcagtatcttaatcttctaacacagcaagcacaagaccctgtgaacaaagacaagtatgccgactttaaatgtgcaggcatcgcagctagtatcgagagcgagtggcctggaacggagcttcaattatcccctgagaacaaacctgtaagcctagagttcagagcagagagtttaaaagcagtcactcaccaagaaatgaccgcatggcagtctagtgtcccggaggatatcttgcccaaactgaaatctgctgaggatgcagagcattacgtccgagaacaagtcgtcaaattcaacgcatcatatatcaaaatcatgcacgggatcggcgacgatgtcgacgtggaatttacggagccaagatgcgaagtgcaaaacgcagtggtagatgcggcgcacaggcgtggtttgatcgttttaggacatgcgttgagctattccgcggcgatggatctgctctcaaacggtgttgatgggttgaccaacatcttcattgatagatcgacatctcgcgactggattgagcttctaaagcgcaacaagggacacttgtgcccaactttgtcgttttatatctttcgcactctccaaggcgacgatattgaagagctgttcgcaagcgatccgttctcagagcgtttgctcttcgacaaaagttctcagaggaacgtcagtctcggttccaagcctgaagatgcagctttcgccaacgctgtgcgcaatgtacaagaggcatacaaagccggggtgccatttgtcatcggatcggccagcacaggcagagagattggcccggcatatgggttgggtgtccatatcgagatgtatctgctttcaaaagcagttggaatgactccaatggaggtcttgaagagtgcaacaagtgaagtcgcggatcgttttggattccatgatcgtggccgtgttgcagtaggcaagaaggcggatctggttctggttgagggtgacgtccgagaagccattgcagatccaaactgccggtgtctcccagtctcatgcgtgtggagagaaggtgttagctcgataatttaccaaagactggctgggccatag

SEQ ID NO: 193 - DNA, 1683 bp, Verruconis gallopava
atgactactattccagagaaggcaactgttcttgtgattggaggcgggccgggaggttcttacgccgctacggcacttgcaagagagggcgttgatgtggttttgcttgaggcagacaaatttcctcgttaccacatcggcgagagcatgttggcgtccatgcgccattttcttcgcttcatcgatcttgactccacattcgacaatcatggtttcatcaaaaagcgcggggcagccttcaagctgaatgacaaacccgaaggctttaccgatttcattgctgcgggaggaccgggaaactatgcctggaatgtgattcgctcagaagcggactacctaatgtttcagcatgctggaaagagcggcgtaaagacattcgatcaagtagccgtcagatcattggaattcactccatgtgacctcgaactaccggatccgaaaacaccaagccctggcagagcggtcgcagcttgctggtctagcaaggttgacggtacatctggcaaaatcagtttcgattatttagttgatgcgagtggtcgtttcggcataacgagcacgaagtatcttaaaaaccgcaagttcaatcagggattgaagaacatcgccaactggtcgtattggaagaacgcgggaagatacgcggttggaacccagagagagggtcagcccttttttgaggccctaagtgatgcaagcggctggtgctggttgattccactccatgatggtactgcctctgtcggtattgttcagaatcaggatgcggccgctgccaagaaaaaagccatggattcgccatcacaacatgacttctacattgaaagcttaaagctagcgccgaggattcaggcactgcttgcccaaggagagatgacggctcctgttaaacaagcctctgactggtcgtatagtgcatcatgctacgcttcgcctaacgttcgaattgttggtgatgctgggtgctttatcgatccctatttctcctctggggtgcaccttgcgctttccggtgccatgtcggcagcttgcacaattcgtgctgtgcagcgtgaagaatgcgacgaaaaagctgcaatggactggcactcgaagaaggtggccgaaggctatacacgcttcctgctcgtcgtcctcagtgccatgagacagatccgcaagtcagatcaaccaatcctgagcgactgggacgaggaaggtttcgaccgcgcttttgcattcttccgtccaatcattcagggaaccgccgacgtcagtaacaagctgagccaagaagagttggccaagacgattgacttttgtctcaatgctttccaacatcacgacgccgatgcgagagacgctatgatcaaaaagctgcaggagcacgagcaggaagctagaatgcgtggagatgttcaagccaaggcagatattgatccagattcactcactccagaagaattgcaggtgttgaagactattcgcgctcgacaaatgctgagaaccgaagatgttatcaatatcgattccttcggaactgacgcaattgatgggttcgctccacgggtgaagcacggagagctgggacttatgaagggtaagaactccggcccagctgctcccaagatggatctctttgcaaaggcgaaagaggagcctgcaatgcagacgcaagtgggtactgcagtcacagcgcattga

SEQ ID NO: 194 - DNA, 1554 bp, Verruconis gallopava
atgggcaatcaaatctcagcattgatgtctgatagcattgtcttcagtcttttcttgcgaatatcatatctaggcctaattctgtcgataatctatgttttggcagctttgacctacaacgtttattttcacccactcaaaaactaccccggaccattgtcgtgggcagcgacgcgtattccctggtgctggtaccaatatcacggtgtcaattggcgcaaaattcttgagcttcacgcaagatatggacatgttgtgcgcattggtccgaacgagcttagttacacctcctctgaggcttggaggattatctatgggcatcgtgttatcgaaatgggaaaagatccggtgttctcgctgcacactccaactggcgttcagaacatcctagtagctgaccgtccgacgcatacaagacagcgacgactacttgctcatgcgttctcagaaaaggcgttgcgtgagcaggaagagatccttcaatcctatactgatcaattgatccgtggcttagaagcccgccggcaagatgctgtcgacattggtgcatggttcatgtttaccacgttcgatctgatagccgatctgtcatttggcgacaatgtgggctgcctcgaaaagggcgagtatgatccatacgtggcagcaacaccagcaatttccaaggagttgcagtactaccagatgctaaagtactggggcatcgcctgggctcgaaaatggtttatgccaacctctgttgctggagcccggatggccaatatgaagcgcgccatgagtacggtcaacaatcgcatcgaaaaaaatggttcagtggatcgaaaggattttttgcactacattcttgcagcgaatgatgaaaaggggatgtcacgacaagaaattgacgttaatgcgttctcgatcagcactgccggttccgaatcaacggccacagccctttcaggtgcaatattttacctcttgcaacacccggcttcttatgcgagcgccacgcgtgaagtccgctcagcgttccatgcacctgaggagatcaccatgagcgaagtcaagaagttgaagtacttgaaagcagttttacaagaaactctgcgcctgtacccacccgttgctgttactttgccccgtcgcgttccagttgaagaggacggagtattcattgcaggtcatcctgttccagccggaacaacagttggtgtcaactattatgctgcattccattcaccttacaactttcaccttgccgagaagtttgctcctgaacgatggcttccagagcactcagatcatgcgccctacgcaaatgacaatagagatgtagtccagccattcagttacggaccgcgcaattgtttagggaagaatctcgcgtgggccgagatgcagctaattcttgcaagggtgttatggcattatgatattacatggcccaaagacaagcttggaaggccagaagttgatgaaggctggcagttaaaccaaaaactgtacggcttctgggtcaaaccaccactaagggtttgcttgaagccggccgatggaatcaggaaatga

SEQ ID NO: 195 - DNA, 708 bp, Verruconis gallopava
atggacgcttaccatctggatcctccgaaagttgcatcagcgcaaacggcggcatctcctgaagagaaggccataccacagcccaggccgggacctactacgactcccccagttcttgatacggcaacactcaagtacatcaaaacactaagtatcaaacatttccgttctgcagatgtcccatggcgctccatgggtcagtacaagtaccgcattatcgaggatggcactcttacccaagaccgcatatccgtggtagagtcgcttatcccgccaaaatcacacggtcctatttttcatttccatgagatgcacgacgaatgcttctacgtcacacaaggcactgtgcgttttcattcgccaggaagcccgccagtggacgctcatgtgggggacatggtaacagtgccaacgaggatgcctcatcgattcagcaacccatttgatgaggaggccaaatttgtatcaacaaacacaccgagtcactatgcacgttacttctactacctggaatacctgattggtgagggaaatgagctgacaccagaagtgaataaagaagcaatgcgtcggttcgctacggtgccattatcgcccgcggacattgaattgttggaaagagaattgggcgccggcacagttggaaatgagaacgagtacaattcagacgagtcagtagatacggcggacttggtcagtcttgattag

SEQ ID NO: 196 - DNA, 1233 bp, Verruconis gallopava
atgcccgcctccaaattggcacaagagtctactcaaaagccagaattcaggccgaccgtttatggactgatttctgagctttgcgtgttgctgaataagctagagagtgatcgtgcggaggtgccctcccttgcagcgggcgcgcattccaagctgtggactgcccaaggcgatagcttagcggcgtctcgcgatcgagctttggagcttttgaggaacctatgccagctattgcaaggaccgcatgaatactttcattccttggtgtcttcaaattgggatcttggagctctctacacaatcatcgagcttggaatattggagaaaatccctttgacctcttgcgcaaacgtgattgatctttctgaagagcttggcttagatgagcggaaattgcttacactcctccgacttgtcacatgctcaaacattctttacgaggccgaagacgggttctttgggcatactgccctgtctcaagagcttttgcaagacgagcaattccgagccttcataggattccagctgtttgaggccaggatcggcagtgtgcatttggcagactccctgaaggggagcaaaaacacctttgagcatgggtgttcagctttcaaacacgcaatgggtataccgctataccagtggcatggtgagaacacggagaaaggtacgaggttccgtatggctatgcagggggtctcaaaaagtctagaccctggtgacgatttgttccgtcagtggtttaagcagcattctgaatctggcacatgtctaaccgtcgtcgacgttcttggaggcaacaaaccaagccagcaaaagttcattggcgagtttccagagctcaatttcgtttccgttcacgacattggcgaaatagcctttgttgacggacctattctggcatatgtcgtccgcaatgtgttctggaacaagagagacaacgaggtgatctccgtgattcggagcatccaccaagctatggagaaaaacgcaaaagccacgctgttgattaatgaaatgctgtcgccagctagaggcgaattcccaggagatctcgagcacgcctatcgtcgacgcgacgttacaacgatgactatgcacaacgcgaagcaacggactgtcgctgaatggcatgggctatttcgtgaagtagatctaaagtggaagatccgactggtcacgggtaattcgtcacatagctacagagggctttgggagatacaaatgaattag

SEQ ID NO: 197 - DNA, 2223 bp, Verruconis gallopava
atgataattctggggcttccgaccgcgcttgtgcactttgtcgggagaaaaaaatccgttgtggccgagagaaacccaaatgtggcaattgtaaacgtcagaaatggcgctgtgactactctgcgccagaaaagcgtaagtgaaaatgtcaactctatcgatgctcgattgggcaacattgagaacgaaatctttcgtcttataagatcccaaaacgcgcccaggtctcgacatggctcggagggcacgcctacatcgtatgagagtccgttcaatccaagtgacaccgaagatgagtcgcggggcagcctgttgacaacagaaagacaactcttgcactcgccagtcacggattcatactacggaccggatacgttttatgcatgggccactgccttcaaagggctagtgacatctcggcgacaaaaagtaggaaaggatgtctctcaacaagggctgaattttgcggttgatgatgagctgggctccatcgaccatgatttatcggaattagtacgatatgccgagagacaggacacgctgtacgactcgagaatcaccgaaacctcaatcatgttgccacccaagcagttcctgccgatgtttcatacaagattctttcaccacaacgattggtcaacagatctatttgttcaagaaaggttttggcagaacgttgatcgagtgtatgccaattacaactctactctagacgaaccatgggcaattgttttcaatacaattatactactttctatgagcgcagaaaactctctccagactcatgctcccttggcaacttcgcaatttgctgcccccttcttttcagcgctcaaagttgccctcaataaagtccatttattaatggcgccgcgactcataaacgtacaagccttggcccttctaagcttagctgccgagcaatttcatccgttcggagttgcagaagcagtgtttgtgcaagcctgtaatctggcaagacgaatgggtcttaatcagattgcgatgactggaacatcggatgcaattgaagaggaagagcgtctcaaagtctcaagggctttatacattcgtgacaaaagcctgggtatttcacgaggcaccatatgctggctgccagggtttgaagtgcaaaatatgaaactggacgactttgaatcagccgaaggaagataccatgctgcacgagtcacgattactgcttttcaggagcgcgtgtatcgcctccattcttcatctggggctcaagatgactttgctaacaaagcgggcttccatccctctggtatacaacacggtttggccgatcttctggaaattggcacgatgtgcggtccccaccttgaactttggttagaattcctcgctacccgtattgttgctctacgaaggaacactaaagcgcattacgtcaagcgcactttaaaagattgtagagcatgttgcatcctgctactattggcattcggaaagggtgacaaagcactgagggaacgactcgagcaccattgcgacctccatacaacttctcaacaaggttccaaatcatcctctctagactctgaaatcagcctcaatgagcacgcaatatcgacgccaagaactctcctctcactcttcccggtgtctagcttatttctgttggctgcaaacgtgatcaaccctgcaactccagaggaggaagcgaacactgatgatgactacgagcttctcgtcagagtttgcgattgctacgaggaagctgatgcaagcctacaagccatcaacagggcccatcaagttggtaaggcgctccaaagaattctgtccatcattcaacacgtgcgtgggatgaatggcacttcccctagcaaaagcacgagtggttcgggtagcagccgatgtcactccgcgtcgttgtcatccagtcagctggaacaaggcggttcttttccagatcagtcgagtttgcagcatctgccaagttctggtttcataaactcgcagcatttcacagatggggcgccgctatcttcactctgtgtgaacgatattgagacattcgtaatgaacacgccatcaggacatgagataagctcggcgttctccgtggaaaatgatatgatgagcttcatgaggcaagatgctatgacttcgaatcatttcagatcggacaattacggaatggaaatttgttatccagtggagggtgcggacccaaatggcgggttgccgggaatatga

SEQ ID NO: 198 - DNA, 1287 bp, Verruconis gallopava
atggcacattctcaggattttgaagttcttatcattggagccggcatcaccggcctcgtgcttgcacaagctctgaagaaggttggaataaagtacaaaatcttcgaacgagaggtacagatgaactatcggagcaacgagtggacgatggcaatccattggtctcttgagcgcctggaaaatctccttccaaaggagatctgggagaaactgcccacgatatcctgcaatccagctattcctatggatgctggaggcaagtatcccatcattcatggtgaaaccggcaagctcctggccggtgtgccatatgccaggggcttgcgtgtcccacgcagcaaaatgagagctctgtgtgctgaaggaatcgatgtgcagtacggcatgaagcttactggagtcgatttcgatgcctctggagttggcgtaacggctacctttaatgactatgagaaagtcaaagcgtccctcatcattggcactgacggcccaaggtctacgatgcgcatttttgccatgggaagcgaggcagaggcgtctactagcaaatttccaatctttcatacgaacatgacagtttgctacggcgacgctgaaaaggcaaagtatttgcgccaggaatttcccacgagttatctcgctctcagcgaaaatagctaccacgctttccagtcaatttccagtatgcctgatggacctgagcatcctgagacctgggtgttccatctggccatggcttggctcggggactctgatcagtccatgagctatcctgaaagactcgctttgatcaaaagcaaggctcagacccttggtgagcctgcaagatctgcctttacatggataccagagaacacgcttgttcacaaggcggacatcagttactggattagcaaaccgtggaataatcacgacggtagaatgaccttggctggcgatgcagcccacgccatgccaccttaccgcgggcaaggtctcaaccattgcatctgcgatgtgtctcaccttcttgaaaagatccaaagcatcttgaataatgagatgggtcaaaaggaagccatctctgcctatgatgacgaggtcgttaaaaggggtgctgaggaggtaaaatgctcgctggagaatgctctcatgctgcacgactgggagaaagtgcagagatcacctgtgtttacaaccggcttcaagccaatgactgggcatgacggggagaactctcatcaaagaatgcttcccgaagccttgaagactcttcaagaagtcaagcaacagattgctagtcattag

SEQ ID NO: 199 - DNA, 6375 bp, Verruconis gallopava
atgacaaaagctatgcgggtcttcctctttggagacctaaatgtctccttcgaggagagcctcagagagttgctctacaccaaggacatgccagtcttgaaatctttccttgaaaaggtggcttttgcgcttcgtgaggagatttcccgcatgtcctcttcctggcaggcgttaatgccacgttttactaccttaatcgatctgctccctcagatcaatggcaagataggaagtccggcgcttagatttgctttgctctgtgtggcggagctaggactgttcattcgcttccatgagcgaaggtctattccatatcctaccggggacaactcgtgtctcttgggtatctgcactggatcttttgctgcagctgcagtcgccgtatcccgtggccttacggacctcgttcccgctggcgtcgaggcgactcttgtagccctacgtacagccacactctcgctgcaatgtcgctttgacatgtgcaacatgacagagacaggctcatcctgctggtccgctattgtcaacctcacggaagaggacgctactaagcttgttgatgctttctgtgaagctcatccgcgagtcagtaggccctatctcagtgcggtgtccccaacaaatgtgaccatcagtgcgaatcctcaagttctcgacgacttcttggccttcgccaaagtgcaatttcgaaagctctccatcgagtctccataccatgcgccacagctatttccggaagttgtttgcctttctacggtcaaaaaatatcacgattctcagctcgaagcacgccagttgcatgttccgctcctgcttccttctggagcagaatgcgagtctcgaagcttcgaagatgtgttgaaggcgagcactcttcacacactccatgagaaagtacgatgggatcgtgttatcgaaactgtgtgcactttactgcagcagcgtaaggctagtgcgtgcgaaatcattcctgtgctgtccaatgcgccgcagctattgttcacgcacattcctcggaagtgtgacatccaaactgtcgtcagcgacctagagcgatgcgaccaaggatcggcttggagcaatccaaccggcaagtttgagcagtccaagatcgcgatcatcggcttttcgggtcggtatcctgactcttccagcaacgacgagttctgggagctgctacgtgctggacgcgatgtgcacaagagaatccccgaggataggttcgactgggaggcacacttcgatcccacgggaaagaagagaaataccagcagggtccagtacgggtgcttcatcaaagagcctggcgttttcgacactcgatttttcaacatgtctccacgcgaggctgctagtaccgatcctgcgcagcgcctgttgatcacgtctacgtatgaagcgcttgagatggcgggcttcgtgccgaatcgtacgccgtcaagccaggtggaccgcgttggggttttcatgggcacaacaagcgacgactggcgcgaggtcaacagcggacaagatgtcgacacgtacttcatcccgggggggaaccgcgccttcatccccggcagaatcagttatttcttcaagttctccgggccgagcctcagcatcgatacggcgtgctcttccagcttctccgccatccacgcagcctgcgcgtacttgtggaagggcgactgtgacacggcgatcgcgggcggcaccaacgtcctgaccaatccggacaacttcgccgggcttgaccgaggccactttctgtctacaacgggaaactgtaaaccgttcgacgacgctgcggatggctactgccgtgcagacgcggttggctgcgtcatcctcaagcgatacgaggacgccgtcgccgacaacgaccccgtctacggcctgatcgcaggagcgcacacaaatcattgcggccaggccgaatccatcacgcgtcctcacgagggcgatcaggcgtccgtgtttaatcgcgtcttgagatacaccaaccaagatcctcgggacgtcagctacgttgagatgcacggaacaggcacgcaagctggggatgccaccgagatgaactccgtcctgtcatgctttgtcagaggcaagcaacggacagcagagtatccgttgtacattggctctgcgaaggccaacattgggcacgcagaatctgcatctggcgtctcctcgctgatcaaggtgttgctaatgatgaagcacaacgaaatcccgccgcactgcggaatcaaggggaagatcaaccacaattacccagatctcaaggcgctgaatgtccacattgctttcaaaccaacaccgtggacacgcgagggctgcgtcggtggcaaacgtattgcatttttgaacaatttcagcgccgcaggcggcaatacggctcttttgctcgaagacggtcccgttcgcgcaaccccagcaaaagacatttcaaggtcaatttaccctgtggcagtttctgcgaagagtgcgaaatctctcgagcgtaatgtgaaagcaatgattgcatttcttgaggcgaatcctgacactgctctccctagcctctcatataccaccacagcgcgacgcattcatcacaacttcagaaccatggtttctggaacagacttaaagtcaataaagctcgagcttgacaagatcctgtcaagtcttccagagaagcccattcccaatgctgctttgctgccgaagattgcatttgcttttactggtcagggttccttgtacgtgggagtcacgaaggagcttttcgatgccgacgaagtgttcaggagcgaagtgctgcgcttggatatcattgctcaacagcatggactaccaagcttcattccactcctcgatggaagtgcatctgcgaggcaacttgaacaacctactatggcgcatgttggtcacacggcgctgcagattgccctaacgaacatgtggtctcggtttggaatttcacctgctctggtcatcggccatagccttggcgaatacgccgcactttatgctgcaggagtgctgacggcctctgatgcgatttatcttgttgggtcccgcgcgcgtctgcttgaacaatcctgtactcctcgctcgcatgccatgatttcagtcaaggcttccatggctgcagttgagccaatagtccaaagtgggtcatcctgcgagattgcatgtgtaaatcagcctgatgccaccgttttgagcggtccgcgggaagaaatagattgcattatgaaagagctcgaaacactggggcataaatgcatcaaacttgaaattccatatgccttccattcggcacaggttgacccgattctggagcctctgggactttgtgaaagagctgtacaattttcaaatccgaaaattcctttcctgtcaccaatgatggcagctgtaatcacagaggtggaacctttcaaggatgcatatctgactaaagcatgtcgtaaaccagtcaatttccatgctgctcttcaagctgcgcaggaattaggaatagtgggtgacaagactttatggcttgaaatcggacctcatcctttgtgcgcgggaatgatcaaagcgactcttggctctgactcagtcacaatgccaactctgacaaaacgccagacctctttggcctctgtggttgttgctttacaagatctctacatacgaggaattgctgttgactggaacgagtattatcgacaagacgctacttcgcttcaagttattgagcttccacagtacaagtgggatcttaagaactactggattcaatataaaaacaacttctgtctaactaagggcgacagcattgagacaaaggatctttcacgctgtaccgtaccgaccgtcgaaaaaacgattatcacgcctgctgttcaacacattattgaaatcagtaaggaaaaggcctccattgttactgagaccgacatcagccattctgcactttccaacgtgattcaaggccacaaggtcaatggaattgcattgtgtccgtcatctctctacgcagacatggccatgactgtttgtgaacagttgtgcaacgcctgcgagatacgcatcgaggaaagcagcttcgaggtcggtagtatgaacgtcaaaaagcctcttatcgcagatggatcaactcaattattgcgcgtatccgcaacagctgatttcgattcacgggaaattgatttgtctttttacagtgtttccgcgagtggtactaaattagctgaccacgcaacttgtaaagctcgtatcaggagcaagggctctcgcgatgactggcaaaggatgtctttcctgatcaaacacagactggaagctcttgaagccagtgttgatcatggcaccgcgaataagatgaaacggggtattgtttacaagctcttcagcgctttagtcgactacagtcaaggttatcgcggcatggaggaggtaactcttgacagcagtgcacttgaagctacggccaaggttcgcttccaatgtggccccgaaggctacgttctcaaccctcagtggatagattgtctgggccatatcgccggtttcatcatgaacggaaatgactctgttgcttccagagacacagtcttcgtgaatcatggttgggaaaatatgcagatcgcaactaagttctccgaggataagacatatcggacatataacaagatgcagctgaccaccaacaatatctatgttggggacacatacatccttgagggtgacgaaatagttgccatttattctggcataaagtttcaaggtgtgcctcgtcgtgtactcgaccagttgcttccgtctgggcagcggcgagcaattccagtcaccacaacacctgctcccaaacttcaagaagccaaaatttcaaatgctctttctaaggggaagagtatttcatcaccgaagcacaaggtgtcatctattaaagacacgattctcaatctaattgccgaggctgttggccttgatgtcaacgaactgaaacccgacacgacctttgacgagtgcggagttgattctttactctcactcaatatttctaaagcgatgcatgatcagcttgggctggatatcaactccagtacatttgcagaatgtccaacaatcagctctttcttgagccgggttaaagaaaacgaagcttctccagggactctaacacctcaatcatccaattccagtactaccgatctcgatagtcttctggatgacaatataagtctcgcgtcatctattactagcgatgaagacgagaaagaggagccacttgaaaagagcaccaacaagactatcgagctcatcagatcagttattgctgccgaagttggacttgaaccatctgaaattggtgattcgacaaatttctcagacctcggcattgactctttgctcagccttaacattatgagtcgtctagaggagattatcgagagcgagattccaaggatgctactcgcggaaaatgagacactcgagaaggtagctcgcgcacttggtctgcagacaaccgtatcgaatgtgactctggaaaaacaaaagcagaagctaagcaacaatacttccgaaacaaagtttgcagtaaggagtccaccgcatgcttctagccacctcctgcaaggtaacgcgaagactgcgacgaaaaagctttttctttttccagatggttctggctctgccttttcctacgcaagcctctcaaggatatccccctctgtggcggtctatggccttgcatgtccatggcagaaagatccatggtccatggccggcgtgtctttctctcagctcagcgccaaatttatcgcagctatcaaaaagatccaaccatgtggaccatatcacctcggtggctggtctgccggtggaatcagtgcgtacgatgctgcgcaacagcttgctgccgatggcgatgttgtagagagccttgtactgattgactctcccaatcccattggactcgagaaccctccacagcggatgtatgacttctttgacgaacttgactttttcggcatggaaggcaaagcaccaccaacatggctccgcgctcactttgatgccttccttacaacgcttgatgagtacaagattgctccatggaaacaaggaaacagcccagctacgtacattgtatacgcaaaaaatggcgtgtgcgacatgctgaagcctgaggatccgcgccccgagatcagggatgacgaccctagggaaatgaagtggctactgaacacgcggactgacttttctgcgacaggctggaagagccttgttggagattgcaatgtcagtgttggggttattgaaggagtcaaccatttcagcatgatgaataaggggcccaagtcggatgagcttgcagacttcatcaagagtgcattgaagatgtag

SEQ ID NO: 200 - DNA, 1449 bp, Moniliophthora roreri
atggcttctgactctgcagattttcgacatgacggcgaggacatctctgagcaagctcaattctccggctcctctagctccgaacatttgcctttagacgcgacgacatccatttcactcgcagcgagctcgaaaagcaaggagaagaaatcaagccagacacaggcagtacaagtcgaagcatttgaggtcgtcgacccggaaaaggatcagagaccagtcgaagcatcatctcctccacccgatggtgggcttcgagcgtggctcgtggtactgggttcttcgttggtgtctctagcaacttttgggattgttaacgcgtatggtgccttctcagacgagtatcaacacactcgcctctccaactattccccaacgctcgtatcgatgattggatcaatacaagtctttctactgtacttcttgggcgccttctctggttccatcttcgatgctgtgggacctcgatacatgattccagccagcgggttgatctgcagttttgccatgttcatgctgtcaatcacaaagcctcagcaaatctaccaggtttacttgacacagagcattcttttcaacatcggcggtgcattcgggttctttccgtccgtgagtgtcatcgcgcagtggttcaagttcaggctggcctatgctatgggctttgtcattgcctccgcgggtctcggcggcatcatctttccgagcatgattcggcaattagtcccaaagattgggtttggatggacagtgcgcataatcgccttcatagttctcttctgtttcacggttgcaacccttaccatccgttcgcgacgtcctaccaagcctcttcctcctttcaagtctattctggcattcaccgcgtggcgtgatcgacgtttcgtagtctttgctatcggtgcattcttcaacatcttcagcatgttccccgtcttcttctcaattggcgcttatgggattgctacggacaacaccgaaggcgcatacctattgatcatcctctctgctactaccattgtgggcagagtgcttccaaatttcttggccgacaaaattggaagattcaatacgatcgccttctcgactacagttgcagctatattctctctctccctctggttcacggcggacggtaaagaggggaacacgatcgccttcgctgcagtgtacggcttcttttcgggaccactcttctctttaatgccgccatgcattgcgtacattacacctgtcgatcgtgtgggcggtcgaattggaatgctcttcgcattcttgtctttcgccgggctcgcaggatcacctcttggtggcttgttcctgaacggaggagagaccgttccacacttcaagaatctcattctttatacgggttgtgttggtctctttggctcggcgatgttaatcgccgcaagattcactatcaaccgcaagttatgggctgcagtttga

SEQ ID NO: 201 - DNA, 921 bp, Moniliophthora roreri
atgcgtgttcttgttcttggtgctactggtgtcattggtggacccattgctcaggcatttgtccgggctggccattatgtcgttggtctaacgcgttcagaagccaaggccaaacagcttgctgctgatgaaatcgttcctattattggcgagcccactgagccagagaaatggatcgatgtcattcgtgacctcgacgtcgttgttgaagctgttggtggtaccgctgaaatttggacactcgccaagaagctcctggaaaccatctccaaagctgccgctgaacttcgcccacctcatgctcccaaactgacctacatctacacttccggcacctgggtacatggtgaagaccgtgaaaccctcagtgtctccgacaccacacctctcttcaaatctgccgaactcgtctcctggcgtccagctgtcgagcagctcattatcaaggatcagggtgtgaacggcatcgttatccgcccagctcttctctacggcagatcagcctctctcctggcacctctcttccaatcagcatcagaaggcaagatcgtctggcctgggactcctgggggccgatatgctctgattcacatggacgatctcgccgatctctaccttagagctgctgagagggcgcctcttgtcggtggacagatcttcgatgccgccaatgacttcaccgagtcacaggcagatatcttgttcgctctggctaaggtatctggtgctaagagtcacgagttctcgccccctgccaacaactgggaacttgcactctcccaaaccactaatcttcgaccatacctagctcgcagccttctaggctggcagccgaagaaagctggtcttgtcgaccatctgcccatttactacgctgcttggcaggctggcgcaggtgctcctcaacgcccacagcactga

SEQ ID NO: 202 - DNA, 3261 bp, Moniliophthora roreri
atgattctctatcaattatctcctatcgctatggggaagttcatccgaccgtatcttaacttgggctatgaggcagaccgcccagatggcatcaacggtcttcctgagctcatagcttttaacgcgaaccataatcccgacctagtctttggtcgtcagacgcgcactgatggatccttctgcgaaatcacatttgtccaactccacgaagccgtagagcgatgctcagcctggctcgtctcttctggagcaactaccgtccgcaagccaggagataccttccccaaacccgttggtatcctccttggtagcgacatcaccatattcatcttcatggccgctcttctccgtattggaacacctgtgctgtgcctttcggccagactcacttcagtagctgttgctcatcttctcaaagctacttcagcctctactattctctacagttctcaagtatctcgcaccattcgagatttgcaggctgactctgagaatgagttggctgtcaagttccaacttgcgcttgggtatgaagcatttatggacccccaacatcccgagctttccactgcctctgcacctgagccgtatgtatacaccgttcagcatgaactcggtgcagtcatcatgcatagctctggaacgactggccttccaaagcccatatatcatgcgccggcgtatattctagggtatgcggcttgccacgaactcgctgaaccttctgatcgctatgggtacaacgtctcaacacttcctttataccatggattcggactcctcgcaccaacgctggctttatccatcggattatcgttcgtattacctcccgcatctacaatccccactgcacggactacccttgctgctctcaaggtcaacgaggctcagtcaatgctttccgtgccttccatacttgaagacattttgaacagttcggatcctgatgccattgctattctcaaatcacttaacttcatcgctattggtggagcccctatgaaggagtccgtggcggagcaactagtggcacaaggcgtcaagctcctaaaccattggggtgctacagagattggtgccattgcgcccgtccgatgcccacccccagattacgactggcattatcttatcccgcgcaaggatcttgggcttgaagtcgttcctctcgacccatccgaccctaacacttccttccgtctcatcggtcacccacaaggctggcctggtccataccacgtacaagatcttcttgtgcgtaaccctaatgcaccctcgcagcttcgtatcctgggtcgagcagacgacctgctagtcctcgcaaccggtgaaaaggttcgtcctactgggatggaacgggctgtttctgagcacccttctgtcaaggatgcattagtatttggtgtcggccagcctgctcttgggttgctcatcgaactgcacaacagcgtcgaagagagcgaggagcacgtattggacagtctgatgccatatttggagaaaggaaacgcattgacagatgctcatggcaaggtcactccgaacatgatcatcttcaccaaggcttctgtaaagccgctcaaccgtaccgataagggtagtttggcgcgcaaagagacctacgcagccttcgacaaggagatcaaggcatgctacgagcgtgcagagcaagcagaggctgagccattccctacgggtgacgaagcagtcttacgcagcgccattaggaaactcgtcgtaacctgcgctactacagctgctgtggatttctctgatggatcgaagaacgattccttcgatttctttgaagttggaatggatagtttgcaggccacccgcctgagaagagcaattcagagcgcgttactggccactccgattgcatcgaagccagttctaccttccgacttctgtttccaaaactcgtctatcagcaagttgactcgtgcagtttctgacatattgtcgggtattagcctagatgatggtctcgacaaggagacgagacgggtggctgcgatgaatgagatggtctccaagtataccgaagagctcaaaacctacgcggcactcgcgcagagtaccaggaaagcaccatggagggaagttacaggcaaggttgtcttgatcactggttctactggaagcttgggttgtatgttgttggagaagttgtcaggggacccaactgtgcagaaactgttctgcttgaacagacctcgcgcaggtggtgctgaggcggcgagagcatatcaaatgagttctatcaagaagcgaggtgccgtcgtgaaggacgaaaattggtcgaagattgtttttctcgaggcgtcaactggtgcggagaacttgggactcgatggtatccaatatcaacagctcctcgatgtgacacatatcattcacaacgcctggcccgtcgacttcaaccgaaacctttcatcgttcgaaccgcatgtcaaggcagtgtccaacttggtgaaactctgcttgcagtcctctgttggcagacctaagcggatactctttgcatcatccatcgctgtcgtgggcaactaccccactttgaacgccgatgacgactactgctgggacgtcccagaacaagccatcgatgcacgcaccactgatgactttggttaccccgaagcgaaatgggtatgtgaaatggtattggatgcggctaacgcgctgtatggaacgggtgaagagcctctagtccgtggctcttctgtgcgcattggtcaaatgactggcccagaaggcataggtgcctggaacgagagtgaacattttccaatcatctgcaagacggcccagcttgtcaaagcactgcctgccttgagtggatcactatcatggatgcctgtcaatcgcgctgcttcggtgatttgtgaactccttttctcccggcatttccgatcattctatcatatggagaaccctgccaggcaatcctggtcaggtattctcgagaacctgtccaccattcttgctggccctcgtcagcaaccacttccactcattccgttcgccgaatggattgaacgagtgcaagccctcggtaatgacccgtcggtaaacactgcggcgaaaattatgcagtttattcagcatgatttcgttcgaatggctgccggtacagtcatcttgaataccaaatatgccaaggaagattccccgacgatggtgagaagtacctcagttgatcggaagcatctagaagagtactgcacgtactggcgaagcgtcaactctttgatttag

SEQ ID NO: 203 - DNA, 876 bp, Moniliophthora roreri
atgacttctccgctggttatcattgttactggtgccaataaaggcattggttttgaaactattcgcaatcttgcaaagaatgcatcctcttcattcctcgccaaggaagtcaaagccgacggtgctctcatctatttgacggctcgtgacgaagctcgaggcaaagaagctctgcagaaactcaggctcagtggatctactcgcattgagttcgtgcaactcgatgtgagcgatcctcagtcggttgaacaattcaagaacttcattgcttcaaggcatgaacgtgttcatgctctcatcaataatgccggggtagcccctgctgttgctggtgacggtgggcggttcgacagtaaaacaatcaactgggtgatgagcgtcaattactggggtgttcgctctatgacaaaggcgttcttacctcttatgcacgagaaagggcgaatcgtgaacctctcgagtggtttgagccatcttggccctatcagcaaccggaccctggtacagcgtttcctcaccgcatcgagggtggagcaagctgacgcactagctaaggagtggcaggattcagttgctgatggttcttacagcaagaaaggctggccatcgatgtcttacagtgtgtccaagatgctcatgaatgctttgactcgggcgttcgcagctgagaatgctaaagcacaccctaatctcttgatcaactggattgaacccggctgggtgacgacagacatgggaggtccatgggcgagcgacggagacgcaaaagaaggttcacgatgtcctacattcgctgcaataggtgaccttaagggaaagtcgggggtcggcttcgataaagacacgaatgaaagggagtggtactccaggaaatag

SEQ ID NO: 204 - DNA, 2076 bp, Moniliophthora roreri
atgggcgacattcgcggtctagaagaacatcagttcgagcagtacgatgtagttgtcgttggcgcaggtcccgctggtatgatgacagcaaccggcctcgcaagaatgggtatcaaacccctcgttatcgactctactgatcacgctggacacgaatacggccgctcagacgctttccaaagccgatgcatggaagtcatgcaaagtttcggggcgcctatcgagcaacttgaacacatgggaaagaagctttacggacgcacattctgggaaatcaccaacgaaaataatgttgccagaacagcatatgcgcgattctatcccgaatttcttgattacgataaagactactctcttgctgtgcgccaggggctcatcgaacaggtcttggcgcatgacatcgagcgccattacaaaggcttcaaagtccagtggaatacacagttcgtttcgatggaactgcctaagactggcgaagaggacggcttctctacgtcggttgttataaaggatttgaagaccgggatagagaagacggtcgtatgcaagtatgttgttgcctgtgatggtgcgcgctccaccgttcgtcgatgggcatcccaattcggtgtgaaactggaaggtgctacccttccagtaacgtggtgtgttttagacgctgtcggactacgaagtgatcacccagaccttgagaagctttgcgttgttcgctcgactaaaggcattgtacttgtcattcccagagagccgattaatggtaaacctgcagcacggttcgacattcaaatcaacaagggtcgagaagatacaacttgtgaggacgcgacagagatgataaaggccattttccatcctttcaaagtggagtgggacgaagttaactggtggtctatctatgatgtggggcaaaggataattaatcgttatagtattcagaacaaggtgtttttcgtaggcgacacctgccatacccacagccctcgcgctggaatgggcctcaataccgctttattggagggtcacaaccttgcttggaaactcgctctggtactgaagggcgtcattcgtccctccctcctctctacgtatgcttctgagcgacatgcggttgccaaacagctcgtcagcatggatcgtcaattggtcggactgtacgcaggtttggaggaacagactgtcacggacttttcctctgatgcaaccacacattggcttgaaaaattgcgaacattccaggctgaaaactatgcattccaagccggcgcttctgtggtctatggcgtcaacgagctcaccgttacacctactggggagtccgacaaaatgaccattgggaagcccggcgttgccgtcggctcgcgtaccagacctgccgttgtaacgcgtctttccgatggtgttccagtaccaatccttcctcgtttcgacggtaaattctctatctatatcctcgtcggtcctctggatgctcctggcgtgctcaacaacctcaaggccatcgataattatattcgaacatccggagggtccatctttacgaaatacggctccgatgtagacgttcacgcgaaagctgtcagtgacagaatgcctacactccgcatccccaacggtacggattcctacgaccctaacttcccagaaggccggcttctgtacacatacgactacgaggatattcctcagatttgtggtgaatacttagcaccaccccacacccttttccgcgtctcagtcgtcactaccacttccgtgcactcccctttgatccagggccccatcctcgatatgctctacccatgtgagtctgacaaggcacaggctaaacattcacgtatccttcaccctgcctggttcttctccgacgatatccccattgtctccccttaccgagagactgctcccgaggcgggaacactcttcgagaatcccatgcaccagaaatgggctatcgacccgaccattggttccatcgtagttgcgcgccccgacgcacatgttggaacgaagacagttggttttaatgtagaggcatggaagcaagtagaatcttacttccaaggattcctgttatag

SEQ ID NO: 205 - DNA, 6606 bp, Moniliophthora roreri
atggcacctacgaccacattcatcaatgttcctgtcttcgccggtcacggtacgactgccatggctgcgtcttccactcgtgaacaggccattgctgatgcttctcacccatctggcgctttgcttctcagctcgttccatcgtgctttcctccgcgaacgagcttcgctctcatccgaagatcttgacgatttagctctccccgacttttctactccccaagaattcctctccatcatcggcgaacagcccattagtaactcccttcaatccaacctttctcttctcctcgtccaggcgcttagatatctcgcccacgtggaggcaggctctttatcggagtcacttaaccctttcaccgaattcttggtcagcaatgtagatcataaagtcggcgtggctgggttctcctcgggaatcctgcctgcctgtgcagtggcatgctctcaggacagcctatcctttatcaaacatgccgtagagcttttccgctttgctttctggttgggacttagatcccaacagtaccagaccaaagcgactcgtgaactgaccaaatctcatggagaaaaaacgcgtcagttttggagtagagttatcatgggacaatctgagtctgaagttagagctgcaatagacatcttcgctgtacagaaccccacgcttccgcaaatttatatcaccgctatcagtgatgacacgacgttcacggtctctggtcgcccggacgctttatctgcattcatagaaacccttccttctacaagccgaatatttaatttgacggtggatacattatatcactctccttgccaccaggacggattgcgagcgcaggttctcgcagatgtcacccgacgtggcgtaatattccctaccctagataacctaatcttccctctccgatcaacttctactggtgaactcgtaaacgagtctaacgacggcacaactctattagaaaacatcctcgatatgatcgttgttcaaccagtcaagtggcacttggtcacagacgctttgtccaaggcgcccccagtcgacattcctattcgcttgttgaactttggacccggaacaggactcactcgttccatggttaaagcattttccaaggacatcgtttccactcaagacttgacctcggagaatgcggccaagcgcctagaaggtgctacgaccgaaggacagatccccattgccattgtgggaatggcattgaacatgcctggagctccgagtgccgccaagttgtgggagttgctcgaaaacggtatcaacaccgtctcggaggttccgtccgaacgcttcaacatctcggagtacaacaagccttcggatcccaaatctaggcgagccatgaaggcgcacaccggaaacttcatggcagacccaagcctctttgatgccaagttcttccgtatttctcctcgtgaagcaaagagcatggacccccagcagcgtatcttgcttcagaccgcttacgaggctttggagaatgccggatacgtcccgaatgctacaccaaccttccaacaggacacctttggttgttacgtcggtgttgcgactgatgactacgttcagaatctcagagacgagattgatgtctactatagtactggtacccttcgtgcgttccttagtgggcgtatttcatacgcaatgggattcagcgggccctcaatcgtcatcgacacagcctgctcatcatcttgtgtttctgtttaccaagcttgtcgggcgttatcgaacggagactgtaacgcagctgtcgctggtggtgttaatgtcattgcaagcccggatatgatgatcggcttggacagggcccattttttgagtcccaccggccagtgcaagccatttgacgcttctgccgacggctactctcgctctgaaggatgcggattgttcgttttgaaacgcctctctgacgccgtcgccgagaacgataacatcctcggggtaattcgtggggttgaggtcaaccaatcaggaaatgctcattcgattactcacccccatgcacctacccaagtcaagctgttcgagaggttgcttgagaaaactggcgttgataggcatcgtatcaacgtgatcgaggcacatggtactggtactcaggccggagatccaaatgagcttgaaagtattcgcaagacttttgctacgggtcgtccaaagtcgaaccctctgcatatcacttccgtcaaggccaacattgggcacctcgaagcagcaagtggttcggctggtttggccaagctccttctcatgcttcgccaccgcaccatcccccggttgatctctttgaagaatctcaacccactcattgctccgttggacttggataacactgcgattgatacagcagcctgcgaatgggctccttcagagcccggtctgcctcgactcgccatgctcaacaactttggtgctgccggttccaatggagctgtactgctggaggaatatgtagcgcctcctcgtgacgaccccataactgcgccgattactttaccctttggtttatctgccaaagattccattgcgctcgatcaactgcgccagcgctatgtggactaccttaggcttcccgagaacgaaggaacgagcctttacgacattgcttataccatgactgcgcgtcgccagatgtacccattccgtatggctgttacagcgtcttctcgccaggagctcgtcgagaagcttctacaggcctctggcactcaagcaaaagagtcgaacgccgaagtagctttcgtattctccggccagggtggtcaatacttgggcatgggtgcggctttgtatgaaacctgccctgtcttcaagacccacgttgacgaatgtcgctcattactatcctgtatgggcttcggcgacatcctgtcaatcatttcgccatccggtgagagaagtgggctaagtgctacagatgaattggaggtttaccaaactgctgtgtttgccttggaatattccctggcacaactatggatgtcctggggcctttctccggtcgcagttgttggtcacagcctgggagaatacgctgccttggttattgcaggagtcctcagtcttcggagcgctctatttgtgatcgcatcccgagtgcgtctcatgcttcgcaagtgcgagatgaatagcacagggatgatagcaatcaataacggccccgctgaagtccaaaagatactcgattcaactcctttgtttgaatctctcagtgtcgcctgctacaacagcgtctcggactgcgtcgttgctggtcctttgacaggattgaaggcactcaagtcttatttggacgatgagatccgctgcaagagtaccatcttgaacgttccatttggataccattccgctgcaatgaacccgctggtggatgatttgaacgcggtcttggaaaccgtcaaacttcatcccccgaggattcctgtagtatccaacgttttcggcagtgtagtagagccaggagatggtaccgttttcacttcgacgtacttctcgcgtcactgtgccgagcctgtcaaattctcagatgggtttgccacacttctggccgacgcggaacttgctgccaatgtttggattgaggtcgggcctcatccgacaaccctacccatgatgaaagcatgccccgctctgccaaaggatattcgccttcttccttcgctcaggaagaaccaagacccttggagtactctcaccacctcattgagtaccctgtatgcagaaaagtcggatgtcgcttggaggaatgtgttcagtcaccttggcagtgtcagctgtgtcgatttgccgacgtacccgttcactaacgtgaaatattgggtcaagttcgaggagagtgaagccactgtgcatacagccacaccccttccagcgcaacagtcggtcgatacgatcaatcaattctcacttttgcgttcctgggttcagcgcccatcaactgcgaatgggaacgtggcaattgtggaggttcccatcagcgtcctctccaagctcattagcggccatcaagttggtgaacatcctctgtgtcccgcatcggtttaccatgaactcgcaatggcagctatcaaacttgcgacgacgaataaaccaggacattacatcgccttacgggatattgactatgctaagcctttggttcatgctgagaacgacaccaggaatatcaggaccgttgtctctatccctgatggtagttggaaggtcatctcgcacagcagcgacgaaagcgtacactgcaccggaaagttctcctgggataacgtcggaaaagctgccctcaaattccagcagtatagacccattctcagccgggaaatcgcctctgtcattgacaatgtagattccgaacttttctcgactcgtacgatgtacgacatcatcttcccgcgtgtcgttcactattccaaagagtatcactccgcacgatgccttactgttcacccttctggtatggagggtcatgctaccgtcaaaatcccacacgcgtcaacccccggtcagtacgtcgttcatccggtcttcatggacaccctccttcacgttgcaggtttcgttgcgaatatgcgagccggtgccaatgacgctttcatctgcagccaggtggactctgtcaaggtggtccctgaactggtcaataatgatgcgacgtacgatgtcttctgccggaatgcatggcttcctgaggagggactcattcttgcggatgcctatgccgtcaccacgggtacctctccgaaaattgttgcccatttgaagcgtatgcatttccgcaaagtccggctcgctagtctcaagcgagctttgaaacatgctcaaggcggatccaccgctccgactcgcaccgccgcaaagtctgcatcatcggttgttgctgcaaagacatcagcatcgcccgcccaagtcaaagttcgaggcaagggcgaggatatactagatcaagtccgaaaagccgtcgcagatacctgtgacgtcccgatgacttcaatggacatttctgctgatctcacctcctttggtgtcgattctttgatgagtatcgagatatttggtcggcttcaagcgttgttcccagatgcagaactagatccacgagtcctatctcatctccgtaccatttcggaaatagcagcagaagtggcgtcgaaggctggtgatctttcaccagccgctacctctgaggcagagtcgtcatcacctgctccatcgactccctccaactgcgggggcaatgttttagatcaggttcgtcaggcagttgcggacacttgtgacctcccagtgacctcgatgaacatctctgctgatctcacttcccttggagttgactccctgatgagtatcgagatatttggtcgacttcaaatgctgttcccagatgcagatctagacccacggatcctatcccatctccataccatttcagaaatcacagccgaggtgacgtccaaggtcggggatgcttcgctggctactacccctgagtcttcgggaacagctgttgaggatgtcgttgcagatactatggtcatggaagagcaaggagccgatgtgaagacggtaatagcaggtgtgcttggtatcggcgccgacgaattcaacgacgacactgacttggagtcgctcggtctggattcactgacatctattgaagttatgcaagcagtgcaggacaacctctccatctctattcctcaacaccttttggcctctcatcccacagttcgagcaatcaacgaatttgtttctagtcaacggaagccgccaaaaaccgaagcacaaagtggtaacgtcgccaaggctccagtgctttctgccgccgccttgaaagctcttgcgctcgatgaaatgccagccccgcttatacgagatccaacatcccagaggacccctcttttcctgattcatgatggaagcggcttggccaactactacggtcggatgtcaagtgttcagcgcaatgtttggggcattttcaatcccaattttgcgacatcggaaccttggacagacttgaagacgatggctgccaagtatgcgtctataatttccagcacggcacgcgggccagctatcatcggaggttggtctttcggtggtgtggtagctttcgaagcggctcgccaactgatgtcggccggccattctgtcaaaggggtcgtcctcatcgattcgcccagtccagtcaatcacgtacctctctcggacgctgtgatcgactcggttgtgaatttagacagtcgtgcagccaagtcagacatcagtcgattagtcaaacgacaattccagatgaattccgcaatgttagggaagtatgaaccatcgacaggtggccattatccccctctcgttctcctcagatcttcggagggctaccaacgccccaacgtgtctgttccgatttggttgagcgaccgaagcgacccccgacaagccgtcagtggatggcaacaggttgttggtactgaggttagagtgatggatattacaggaaaccacttcgagccatttagccctgcacatatcccctcggtttctcaaagagtttcagaagcatgtagttatcttgaatctctctaa

SEQ ID NO: 206 - DNA, 756 bp, Moniliophthora roreri
atgtcttctccattgtcaggcaaagttgccatcgtcactggctcttcccgttctatcggtgcctctatcgctaagcgccttgccaaggatggtgccaccgtcgttataaactacgtttccaacgccgacgctgcaaacgaagttgtcaacgacattaactccaagggcccaggcaaggccgtcagtatccgagccgatgtgtcaagtgtggagggaggaaagaaacttctcgacgagactgtcaagcagctcggaaaggtcgacattctcgtattgaacgccggtattatgggaagcaaagtccttgccgatgtcgacgagcaattctacgatgaccacatgaacatcaacgtcaaaggacctttgttcttgacgaaggctgctgctccactactcccctctggtggccgcgtcatcttcttctcaacatcgttgaccaaggcgtccgctgtcctccccaatgctcttgtctacgtagcctccaaagctgctattgagcaattatcacgagttctcgccaaagacctcggtggtcgtggaatcactgtgaacaccgtatctccaggaccagtcgatactcctttgttcagagcaggaaagccagaacaggttattcaattcattgccaatcagaacccctcgaaacgtctcggtcaacctgacgatattgccccgatagtggccttcctgtcaggtcctgaggctggctggatcaacggccagaacatcctggttaatggagcgttcgtcgtgtaa

SEQ ID NO: 207 - DNA, 1167 bp, Punctularia strigosozonata
atgtcgcgccccgctcgcatactggacaatgcgcttggcgctgtcggtaacacgcctctgatccggctggacaagatagcaaagcatgagggcctgaagtgcaatctcttgggcaaggtcgaatacatgtcggccggtggatctgtgaaggatcgaatcgcgaaggcgatggtggaagccgcggagcgagaagggaaattgattccgggaaagagcgtggtgatcgagccaacctctggcaacacaggcattggactcgccatggcgtgcgcgatcaaagggtattccgtaattatcacccttcccaacaagatgtccctggagaaagaggctgctctccgcgccctcggagcagaagtcgtccgcacgccgaccgaagcctcatgggactcgcccgagtcccacataggcgtcgctgagcgacttcagcgagaaataccccatgccataatcctggaccagtatcgtaacgtgaacaacccgctggcccacgagctcacgacagggccagagatcatcgatgccgtggtcttcacaccctccaccgtggagaagccatcgtcccagaaggtcgatgtcctcgtagcaggcgccgggaccggcggtacgattaccgggctctcgcgtgcagtcaagaaggcacataatccaaggtccgtcatagtcggcgtcgatcccaaaggtagcatccttgcccaacccgagacgctaaatgacgaagaccgcgggatctcttacatcgtcgaaggcattggctatgactttatccccgacgttctttccagagttgagggtgacatcgatgagtgggtgaagacttccgacgaggaagcattcgctgctgtgcgcctcctgatgagacacgagggccttctcgttggtggctcttctggctccgctctcagcggcgctctccactggctgaagacggagaaggggcgcaagatcgcggagactaccggactcaacgttgtggtcatattgccggacggcatccggaactacatgagcaagccgtggttcttgaaaatgacgttggaggccgagagatcgccgttagcagatcagatctcgaagattttgaagcctacatcgtcggatctctgcgcggacgctccagagcggatcgccgacggcatttcggagggaatgcaaagcggcctataa

SEQ ID NO: 208 - DNA, 432 bp, Punctularia strigosozonata
atgccgcgagtctctccgtggcgaatacgtgccggaaacggggcagaaaactgggcgcaaaaacgctggttgtcgtttcaacaggattgtctgaaaagatggacatgccgcgagcatctccctcgtcggaaagcctctaaaccgcggggtggagcgctgctacgaggcgcgaaaattgcgtcccgtagccgcttgcgcactgcacagccattgcaagcaaggaagcggaagtccgtgcgggcccgaagtcggaaaacgacgcagctggcggcgcgagttcgtcgtcgccatcacactgtggcgtcaaactccttcgcgcgggttcggcgggcgcatacttactacgtatatggtgttgtcatactggtccgggacgactgggacgaagcggtaccgccgctaaacttgtttcaatgccgatgcgcagtttga

SEQ ID NO: 209 - DNA, 246 bp, Punctularia strigosozonata
atgctccctcgcgtcaaaaagcccatagaacagttgctgaagcggccgagagggtccgaagacgatgctgctcataaatcgcgcccatacatcaagactcgctccattccaccctgttcttcgtcgcgaaacagataccacgagtgcctatcatggtacgagccccagctgacgaccagcgctgaaactctcagcaaaatgaacgagatagccgggcgagaacttgagcttgtccttggcgcatag

SEQ ID NO: 210 - DNA, 729 bp, Punctularia strigosozonata
atgagcaggaatgatactgctctccatgcaaacccaccgcctcatcctgtcatccggggctctcaggagcgatctccgagctacgaaccgtgcgcaggttgccagtggccacccagcaacagcagaccacaggttcagcctggatacgacacggctcctcaatatgtggcttggccgccgacccatggttcaatagcgcaacaaccgatgtatgcgcagcctatgtatggacttgacacaacgtacagtaacagtggcacgatatcccccacctcgacaaattttcctatcactcagaccgcatcggcatcttatgctcgcatgagcgaaccctatggtcaattctctcctgaggttactgtacccgttgtgcctagtcaacgagacttggacccactagcgtacacgacgcacgatggcaacggatcgccgttcaatcaccaggtgccaaatgttacttcttccggcgcgacggatgaccggaggcaagagtctgctgtggaggcagtggaactgcataccgggcgatgggcgtgccccaaatgctacccgaccagaacgtacgcgcggcacacggaatgtcatcgccatatacgcgatcaccacttgaatctacctcggcatgaatgtccttactgtggcaagacgtttccaccggctcggaaggagcagttgagcaggcacgttctcaaggaccaccctgagtgggctgcgagctgggtcgtctag

SEQ ID NO: 211 - DNA, 1083 bp, Punctularia strigosozonata
atgtctgacagcagcgaggatgccccgcgagtaactcggccccgccgaacggatcctcatcgaatcggcaactggaagattgggcgagtaatcgggcagggcagctctggacgcgtacgggttgcgcggaactctatcactggccagcacgctgcggtcaagatcgtctcaaagacatcggtgtttaactcgcgcatgtctggcatatgcgaactaggcgacgatgcggaccaaattctactcggaatacaacgagagattgttatcatgaagctcatcgatcatccgaacatcatgcggctctatgatttctgggaaacgtcttcggaactattcctgatcttggagtacgttgaggggggcgagctcttcgagtatctgtgcaagaaaggagcactcccgactgcagaggctttaggctacttccaacaaatcatctgtgccgtggactactgccataggttcaagatcgcgcatcgggatctcaaaccggagaatgtgctactggacaaggataagaacatcaagatagcagactttggtatggcggcttggcaagtgcacgacaaaagcgggctcctacggacggcttgtggcagcccccactacgcggccccggaggtgatacgaggcgaggcttacaacggttctatgtctgacatctggtcttgtggcatcatcctctacgcactgctcatgggaaaacttccttttgacgacgaggatctcaccgtgctcctggagaagatcaaatctggcaagtacacggtgtctgctagcatgaatcccctggccaaggaccttctggcacggatgctcgaactcgacgtcaacaaacgaatcactatggataaaatcctgcttcatcctttcttcgtgtctcagccacccaagcaaacctgctcaagctcggtgccaggcctggatgctctcgaccgccccgtcggaggactgcttgacgtcgaccctgaaatcctccggaatctctgtactctctggcacgaatcctctaaggcggaagttcttgagcggctcgcaagcgacgaacaaaacctcgagaaagacatttaccgtctcctctaa

SEQ ID NO: 212 - DNA, 204 bp, Hydnomerulius pinastri
atgaagcccagccacatcgctcgcgccactggcatcaatgcacggacaattcgacgaaccctggaactctggtggaagataggttcagtgcaacggacgccaattgagcgaggtagaaaagagaggttgaatgcacttgatattgcagtacatcccgtgctcgtcccccttgccaagactacaagacggaaagcttacatctag

SEQ ID NO: 213 - DNA, 1383 bp, Hydnomerulius pinastri
atggacccctcgcggccatggctcttgtttgccgagtggcacaaacaatatggacctcttgtgtatacgaacatcggccaacccatgctaatcatagattcagaaagcattgcacgagaattactcgagaaacgctcatccaagtattctagccgccctcaaacccctacatttgatctatatggctgggggtggaccacagtggttttaccttacaatgaccgatggagacaacaccgacgattttacatgcatggctttcgtcccgacgtcgcggtacaatggcgtccatttcagttgcagaaggctcggaccttgctgctcaaccttttaactagccccatggaccacgagcagcatatttctacattcactgcctctacagttatgtctgttacttttggctataacactgcgccacgcgatgacccacttgttgaggtcgtcaaccaagccatggtcctcttggtaaagggcagtgcaatttcgaagatcatctttttcaccatgttcccttttctacaataccttccaacgtggttgccaggcctcggcttttatcgtgatgcacaggcttctcgaaaggtttcacggcttatgttggacgctccgttcgagtttgtgaagaaatccatggctgatgggaaggcacaaatatcacttgtttccgaatttctttcccgtcaagatgaggacggtggatcatatgatggcgaagatatcgtcaaggaggtagccgcaagcggattttcagctggcttcgaaacgacttcttcatatttgatggccttcttactggctatgaccatggactattcgatccaggaacgagctcaagctgaaattgatagcgttgttgggaaagggaggcttccagactttgacgacaggccatcactcccgtacgttgaagctctgctacgtgaactaatgaggtggcaccaagtagccccatttggcgttgggcatgctgttaccgaggacgatgtctacgacggtgttttcattcccaaaaacacaattgtcacggtcaacatatgggctattgcacacgacaagtccaagtatcctgacccacacacattcaacccttcccgcttcttgacgccggagggcaagctgaatgacgacgacatgcacgtcattttcggttttgggcgtcgaatctgccccggtcgccacctcgcagcagcatccttgtgggccgctattgtctccatccttgcgactttcgacattcgcaaggcgaaggatgagaaaggcgatgacattgaaattacgcccattttcgcgccaggggcgacctcccgtccccttccattcccctgtaagatcacgccaagatctgtggaaacggagaacttggtaaggatagacgcctag

SEQ ID NO: 214 - DNA, 252 bp, Hydnomerulius pinastri
atgcaaagtgtgctccaccttcgacacatctggccgagacttcggatcagatatgctcctggtttcgttagccagcaagccatgcccttgaagtaccgcccgaacactgcccgaacgtcacaagctcgtggccgccgcgatctttgctctctcaaaaccaccctcactactatgctcgcaaattttctcctgcagtgggtggccttcacgccagccaaggaaatgacatcctccgtaccaagagaaacctga

SEQ ID NO: 215 - DNA, 681 bp, Hydnomerulius pinastri
atgtctctcatccgcctgccgttcattctctctgctgcccttggcatgcaggtcgccgtgacagccccacacaccgcggctcccgatgaacaggtgaagtcatccactttccgcgaggcgttcctcgctcgcacagcgatcatgtccccattattcactgtggctctcatctggtccgtcgcactcctagaaatatctgccatcctctctccataccttccctataacttcccatcattgcccgcgccaacaaactgtcctcctgtgttcatcgtcggcagcctcctcgtcacaagtgcaggtcttttgcgctggcaatgttaccgcaccctcggtcgtttcttcacctttgaactctccgttaaaaaggaccatagactcgtcacccagggaccgtattccgttgtccggcacccaagctactctggcacactcttgctcacgactgggatgttgcttgtgaatgcccatcccgagtcgtggttgaggacgtcaggtgtcttggattttactccgcttaaaataattctcctgggttgggcaggtgtgacggtcgctatcgccaccagtctattcgccagatccgctcacgaggaccagctgatgagaaaggagtttggggcggagtgggatcggtgggcgagtacagtgaggtaccggatcatacctggcatctactga

SEQ ID NO: 216 - DNA, 681 bp, Hydnomerulius pinastri
atgtctctcctccgcctgccgttcattctctctgctgcccttggcatgcaggtcgccgtgacagctccgcacaccgcggctcccgatgaacgggtgaagtcatccactttccgcgaggcgttcctcgctcgcacagcgatcatgtccccattattcactgtggctctcatctggtccgtggcactcctagaaatatctgccatcctctctccatacctcccctataacttcccatcattgcccgcgtcaacgaactgtcctcctgtgttcatcgccggcagcctcctcgtcacaagtgcaggtcttttgcgctggcaatgttaccgcaccctcggtcgtttcttcacctttgaactctccgttaaaaaggaccatagactcgtcacccaggggccgtattccgttgtccggcacccaagctactctggcacactcttgctcacgactgggatgttgctcgtgaatgcccatcccgagtcgtggttgaggacgtcaggtgtcttggattttactccgcttaaaatatttctcctgggttgggcaagtgtgatggtcgccatcaccaccagtctattcgctagatccgctcacgaggacgaactgatgagaaaggagtttggggcagagtgggatcggtgggcgagtacagtgaggtaccggatcatacctggcatctactga

SEQ ID NO: 217 - DNA, 4236 bp, Hydnomerulius pinastri
atgaccagcactgtgacctccggtgagaaggtcgactctgactcggaacaggtcttgaagcatgtcctcaggcgcgacgagaacaccgtgtctcgccagctcggggtggctttccaaaatttgcgagtagtcggcgtcggcgctcgctcttccttccagcaaacaattacatccgtccttaatccgctcgttatatggaagtctctcgtttcaatcagaaatcccccactgcgtgacatcctttcaggcttcgaaggcgcggtcttgcctggtgaaatgctcctcgtgttggggcgtcccgggtctggctgtagcacgtttcttaagactctggcgaaccagcacgccgaatatagatccgtcgaaggccaactccattacgattcgttcacgccgaaagaaatcggacagctttacagaggagacgtgacgtactgtcaagaagatgacatccatttccctacgctgacccttctagaaacactttcctttgcctcaaagactcgggctccgcagtgtcgcccgggaaatcagtccagacgagagtttgtggacgaacaagttaatgcgcttctctccatctttggtctggagcacgccaggaataccatcgtgggtgatgcaatgcttcggggcgtttccggtggggagaagaagcgactatcgctggcagaagcactggcgttgagaggcaagatcggaagctgggacaactcgactcgcgggctggattcgtccacggcggtggagttccttcgtgctctacgggtcactactgatactacccgtgctgcaacgatcgtgtcgctctaccaggctggcgagccgttatacaatctgttcgataaagtgtgcgtgatctcggagggcaagatggtttatttcggacccgcggcggaagcaaagcagtacttcgttgagatgggttaccagccttacaaccgacagaccaccccagactttctcgtatccgtgacggacgcgaacggccgcgaggtgatccctggctatgaatcatctgttcctcggactgcgtcggaaatggccgcttatttcctatcatcgaagcacggagagctaaaccgtgcatctgtcaaggagttctgcgccaaacgtgtcggaaacgaagctctgagatcggaatataggaccagcgctctgctggaacactctcgacatgcatctgctgctagtccatacatcatctctattccgatgcaggtccgtgcggcgatgctacggagagtacagatcatgaagggtagcgttgcagtgatcatcatcgacatgtgtgcgcaacttttccaagccattgtcatgggcactacgttcttccggctggaagaagcgacttcggcgttcttctctcgagggggtatcatcttcttcgcactgttttttggggcggtatccgcaatggcagagatacctggtctgtttgcgcagcgtcggattgtgctgcggcagcaaaaagcagccatgtaccaccctttcatcgagagcctgtcgtatgcgttagtcgacgtccccatcacgttcatcatccaggctttgttctctatcgtgatctacttcctcgttggtttacagaagacggctacacagtttttcatattcctgctgttcgttttcacggtgacgttgtgcatgaagacgctcttccgggcgatcgccgcatcgctgaggtcgcagatcgctgctcagtcccttgctggaatcatcatcgtcgtggcgattctctatgctggttacacgatcccgattccgagcatgatcggagggttgaaatggctgtcctatatcaatcccatccggtacggatttgaagcgctgatgttgaacgaattccatacgatcaacgggttgtgttcgtcgctcattccacaaggaccaggctatgagaacgtgtcggtcgccaaccaagtgtgcaccacagtaggttctgtacccggggaagcgtacgtgagcggaagtacgtttttggagctctcgtttggatatgcgtacgggaatctttggaagaattacgggatcgtgtgtgcattcgggctcggattcctcgttatctatctggtcgcgacggagatcaatacctcggctgcattcgagacctcggtgatgcttttcaagcgtggatccaatgtcaccgttgaggatgaggcggcggccaacgacgaggagaaggctggtgatcggacccattccgcgtccgctgcctcccctacgcctgctgcaagggctggatctcctgaccaggctggcctcccctcggagaagagcgagaaactcggattggcagggaccgtaccaagcatgaccgacgtgttttcctggcaacatgtctactataccgtaccgatatctggtggggagtcgcggcagttgctggacgacatatccgggttcgtagcaccggggaagttgacggcgttgatgggggaatcaggcgccgggaagacgacgctgttgaacgtgcttgcggacaggacttcgacaggtgttgttcgtggagatcgctttgtgaacggacagccgcttcctgcggatttccaggctcagactggatattgccaacaaatggacacgcatcttggacgagcgtcggttcgcgaggctctcctgttttcggccaatctccggcaacctcaatccgtccccgtggccgagaaagaggcttatgtcgagaaatgcctggagatgtgtggactggaagcttacgcagacgccatcgttggatcattgggtgtcgagcagcggaaacgggtcacgatcggagtcgagcttgctgcgaagccgaagttgctgctgttcctcgacgaacctacttccgggctggattcacagtcggcatgggccgtaatgactttcctccgcgatctcgctgcgagtggacaggccatcctttgcacgatacaccagccttctgccgaattgttccagctgttcgataggttgttgctcttgcgcaagggtggtcaaacagtctacttcgatgaaattggggaccgcgcgtcaactcttttgagctacttcgagaagaacggagctccacggtgtgatcctgacgctaacccagcggagtacatgctggatgtgatcggcgccggggcgacggcgacaacgtccatcgattgggctgctgtctgggggcgttctcccgaagcccagaagctccagagagagatagaacagattcacgccgaaggccgagagcgtcctgttcatcaaagcgacgttcattccgaatttacgacttcttgggcgcatcaattcgtcaccttacttcgcaggagtttccacaacatttggcgcgatccggtgtctgtctttgcgaagatcgcgttgaacgtcgtcgcaggactcctcatcggtttctcgttcttccacaccaaggatgatgtccagggttcccagaacaagcttttctccatcttcatggctatcatgtgctccatccctttgggccagatggtgcagaccgttttcatcgacgtccgagacgtatacgagatccgcgaacgccccagtcggatgtacagctggacggccctcgtcacctcccaaattatctccgagctcccctggaacatctttggatcctccctgtactttgtctgctggtattggaccgtcggttatgagaccagtagagcgggctacacgtacttgatgtacggcgtcattttcccggtctactatgtgaccatcggtcaactgttcgctgctatgtcacccaatgctctcattgcatccctgctgttcagtgtcatgttcacgtttgtgctcatctttgatggcatcctgcagcctttctcgcaattggggtggtggagatggatgtatcgagtgtcgcctttcacgtacttggtagagggtctattgggacaagcgatcggtcggcagaacatcacctgcgcatcacaagagctcgtcacgctcaacccgacatccgactcgacgtgcgccgcatatctggagtcgtttgttgattcagttggtggataccttatgaatcccgacgcgacggatgcatgccaatactgtccgtatcgaacgaccgatcaatacatgttgaactccttcaacatcaagtacaaccttcactggcgagacgccggaatcatgcttggaacgattgtgttcaatgtcttcgctatctatgcctttacatatattttccggatccatactggaagctggattaattggaaaaagacagcgagtgggaagaaatag

SEQ ID NO: 218 - DNA, 1776 bp, Hydnomerulius pinastri
atgtcaagcgctcctcccaaacccattactgtcctcacccccgagctgtcccgggcactcaagcaacgctcagaaagtctccttgtggatataatcaagaaaaaccacatctctcgttatgtacgcgagtccccctcgctcctctgctttcgaaacaccctacgcgactttactatcttccaagatacaccagcgcccctattggaacattttcgcgatactgttcctctctctgtgtacgacacttacgaacctttcatccgcaagcttgtcgagaaaccttgcaaaaaggtggatgtagaagatctcctttcccccggatacccgtcctatgttgcgttgtccagtttcaccactggaaaggcgccgaagtatttcccaaaatatgacttctcgcgagtcaacccaacagaaggctctatttcagcgacaagcaagttcaattgtctcgtcatgcatcttgggaccaagtggaccattcttgtcgaggatgaagacggccagatcgaccacaagcttccggtctgcacaatctcgtcggggataactcgcaccatgttcaacatgaaagtcgaccaagagcacctagcgatggaaatgaaagttccggcgttgacgtcgcccctagcggtctccttcatcaacaattaccgctcattcatccttatgcatgcgctgtttgccttagcagagcgccgcctagaaaccctgtccacctcattcgggactatattagttgatttggtcaagttcgtggaggaggagtgggacagtatcctcaacagcatcgaaacaggcattctacctgatttcgacggtactgaccatctccgggtctatcttcagccatattttctcgccaacccggaaagggcagcagaacttcgtgcccttggagccgccaaagattctcccgaatggttgaagatgatctggccaaacttcaaggaatactctggtatcatgagcggtgcatacactggcgtcctttcgaaggtacagcggtactggggtccagacgtagccctacgcaccgcaggttatatcctatcggaatgttggcccggtataagctacagcggcgtgaacctctataaactcgctaacgatgagtatttcgaattccttgaggtgtcacagcgcgagataccagacgaagagaccgtagaaacagcagctagcttaattcccgtttggaaaatggaggcgggtagggcatacgagcctgtcatcaccagtcgcgatggcttgtggcgataccgcctgggagatatgatccagatagagggctttgagcccaacagcggttcgcccatcttcggtttcgtcgaaagacgacatgaagagatacgaattggtgatgcaactgtccccgcgaacgtcatcagcaatgccatcctctccaccaccgaggacactataggccaggttacggaattcacttcgttcctcgactctcgagacaatcaagttaccatcgggtatttggttgagattgggggggaaattggtcccaacccgtccctcgcccgtcgccgagtccttgatgcactcatggagcagcatcatatgatacgagttaacatcgaaatgaaaaaaatgaggttgccgactatccgcatcgtagaacgaggcacattcggagcatatcgccattggagagtcgagaatgaaaacgtcagccttgcgcaggtgaaggtgcctgtcgtcttcaaaaacgaggaactgttgaagcaactgctgaaaggggtagtccaggaaattcaggaaccctga

SEQ ID NO: 219 - DNA, 1548 bp, Hydnomerulius pinastri
atggactctgcgcgtagccaaattctgtggttcttgcccctattgggtgcgattggtgttctactcaacagttaccgcaagaaacgagcacatggcttgccttaccctcctggtcctggttttcttcacgctgtgaagggcctagccacagtagactcctcggcgccatggctcttgttcgtcgagtggcgaaaacgatatggacctcttgtgtatttggacgtcgcccaacccatgctaatcatacattcagaaattattgcgcgagaattactcgagaaacgtgcatccaagtattctagccgccctgaatcaccaactttcgaattatacggatggggctttacgacagcgttgctgccttacaacgacaaatggaggcagcaccgacgattttaccagcgcggcttccgtccagatgtcgcgatccaatggcgtccattccagctgcagaaggctcgcacgttgctgctgaatctcctgaacagcccagaggaccatgttgagcattttgctacattcactgcctctaccatcatggcgattacatacggctataccaccgctccgcacgatgatccgcttctcaatatcgtcaatcgcgccatcgctatctttgtcaaaagcacggcaatcttgaacgtcataattttcagcacgttcaccttcttggagtcccttccaacttggttgcccggactcggtttttatcgcgaggcctcagtttctcgggggctctcacgaaaaatgctggacgctcccttcgactttgtgaagaagtcaatgggtgacggaacggcgcaagtatcgcttgtttctgagtttcttgctcagaacgatgagggtaccggcccgcttgccagcgaagagactatcaaggaagtcgccgctagtgggctctcagctggtatcgagacgacctcttcgcatgtgatggtgtttctaatggccatagcaatgcacccctccgtccaagaacaggctcaggccgaaatcgactctgttattggcacaggaaggcttcccgattttgacgacaggccttcgctcccgtacatcgaggcggtcctgcgggaaacgctgaggtggcaacaagcatctccgtttggggccccccatactaccaccgaggacgacgtctacgacggtgttttcattcctaaaagtatgctcaccacaccattgtcatggtcaacatatggcacggctattgcacacgacgagtccaaatatcctgacccacatacatttaacccctctcgcttcttgacgccggagggcaagctgaatgacgacgacatgcacgttgatttcggttttgggcgccgaatctgtcccggtcgtcatgttgcagaagcatcgttgtgggccgccattgtctccatccttgctgcttttaacgttcgcaaggcgaaggatgagaaaggcaatgacattgaaattactcctgcaatgacgcctgggcaggtcgtccgccctgttcccttcccgtgtagaatcataccgaggtcggcggaaaaggagaatttggtcagaatggatgactag

SEQ ID NO: 220 - DNA, 810 bp, Hydnomerulius pinastri
atgcgaaggagccaccgtccaactccaagatgggccaatctttcgcaggtcgcaccatacccttgcatcattggtagtagtgaatgcaactctggaaggctagaacgcttccaactggatcgcagattccagcttgctcgagatcctggatacgaagatgtcttaacgatagggcgaacgcgtccaggcgcgatcttcttggatattggctgttgtgttggcacagacattaggaaagtggtggccgatggttttccagccgaacgtgccattggttcaggcctatatcccgaatttggagagttaggacacaagttgtttagaacaacaacagagagcttcgcagggcattttgtccctagagatgcacttgatcctgccatgctctcggtggtaaagccgttcgatagagctccagactcaccagagcctgagttgtcgtctttgacatcgctgaacccgctccaaggacgcgttagcgcaattcatgcgtccgacttctttcacctcttcagcgaaaacaagcaattacacctcgcacgtgcgcttgcagggcttctgtctccgcaaaccggttcactcatatgtggcgggaattggggcttacctgagaaagggatgatgaaggaagggatatttgactctaggatcgaaatgttttgccactctccgcagacttggactgagctgtgggatggtgtggtttcaagtttcccaagcggacaagtgaaggtcgatgctcacatctctgaaatcgagatggaaggattcaacttctggtacttgcgatggtgtgtaaggaggctttga

SEQ ID NO: 221 - DNA, 4212 bp, Hydnomerulius pinastri
atgtctcgccagctcggagtcgctttccaaaatctgcgagtggtcggcgttggcgctcgctcttccttccagcagacaattacatccgtccttaatccgctcgttatatggaagtctctcgtttcaatcagaaatcccccactgcgtgatatcctttcagacttcgaaggcgcagtcttgcctggtgaaatgctcctcgtattggggcgtcccggctctggctgcagcacgttcctgaagactttggcgaaccagcacgctgaatatagatgcgtcgaaggccaactctattacgattcgttcacgccgaaagaaatcggacagctttacagaggagatgtgacgtactgtgaagaagatgacgtccatttccctacgctgacccttctagaaacactctcctttgcctcaaagactcgggctccgcagtgtcgcccgggaaatcagtccagacgagagtttgtagacgaacaggttaatgcgcttctctccatcttcggtctcgagcatgccaggaataccatcgtgggtgatgcgatgcttcggggcgtttccggtggggagaagaagcgactatcgctggcagaagcactggcattgagaggcaggatcggaagctgggataactcgactcgcgggctggattcgtccacagcgctggagttccttcgtgctctacgggtcactactgatactacccgtgctgcgacgatcgtgtcgctctaccaggctggcgagcagttatacaatctgttcgataaagtgtgcgtgatctcggaggggaagatggtttatttcggaccggcggcggaagcaaagcagtacttcgttgggatggggtaccagccttacaaccgacagaccactccggactttctcgtatccgtgacggacgcgaacgggcgcaaggtggtccctggctatgaatcatctgttcctcggactgcgtcggaaatggccgcttatttcctatcatcgaagcacggagagctgaaccgtgcatccgtcgaggagttccgcgctaaacgtgtcggaaacgaagctctaagatcggaatacaggaccagcgctctgctggaacactctcgacatgcatctgctactagtccatacatcatctctattccgatgcaggtccgtgcggcgatgctacggagagtacagatcatgaagggtagcgttgcagtgatcatcatcgacatctgcgcgcaacttttccaagccatcgtgatgggcactacgttcttccgactggaagaagcgacttcggcgttcttctctcgagggggtatcatcttcttcgcactgttttttggggcggtgtctgcgatggcagagatacctggtctgtttgcgcagcgtcggatcgtgctgcggcagcagaaagcagccatgtaccaccctttcatcgagagcctgtcgtatgcgttagtcgacatccccatcacgttcattatccaggcgttgttctctatcgtgatctactttctcgttggtttacagaggacggctgcacaatttttcatattcctgttgttcgttttcacggtgacgttgtgcatgaaaacgttcttccgcgcgatcgccgcatcgctgaggtcgcagatcgctgctcagtcgctggctggaacgatcatcgtcgtggcaattctctatgctggttacacgatccccattccgagcatgatcggggggttgaaatggctgtcctatatcaatgcatgtcgcttccctcgttattcccttgcgctgatgttgaacgaatttcatacgatcaacggattgtgttcgtcgctcattccacaaggagcagggtatgagaacgtgtcggtcgccaaccaagtgtgcaccacagtaggttctgtgcccggggaagcgtacgtgagcggaagtacgtttttggaactctcgtttggatatgcatacgggaatctatggaagaattacgggatcgtgtgtgcattcgggctcggattcctcgttatctatctggttgcgacggagatcaataccgcagctgcattcgagacctcggtgatgcttttcaagcgtggatccaatgtcactgttgaggatgaggcgacggccaacgacgaggaaaagggtagtgatcggtcccattccgtgtccgctgcctcccctacgcctgctgcaagggctggatctcctggccaggcttacctgctctcggagaagagcgagaaaggtgcattagccgggaccgtaccgaccacgacggacgtattttcctggcagcacgtctactatacggtaccgatatctggcggggagtcgcggcagttgctggacgacgtatccgggttcgtagcaccggggaagttgacggcgttgatgggggaatcaggcgccgggaagacgacgctgttgaacgtgcttgcggacaggacttcgacgggcgttgttcgcggagatcgctttgtgaatggacatccgcttccggccgatttccaggctcagactggatattgccaacaaatggacacgcatcttggacgagcgtcggttcgcgaggctctcctgttttcggccaatctccggcaacctcaatccgtccccgtggccgagaaagaggcttatgtcgagaaatgcctggagatgtgtggactggaagcttacgcagacgccatcgttggatcattgggtgtcgagcagcggaaacgggtcacgattggagtcgagcttgctgcgaagccgaaattgctgctgttcctcgacgaacctacttccgggctggattcacagtcggcatgggccgtcatgactttcctccgcgatctcgctgcgagtggacaggccatcctttgcacgatacaccagccttctgccgaattgttccagctgttcgataggttgttgctcttgcggaagggtggtcaaacagtctacttcgatgaaattggggaccgcgcttcaactcttttgagttacttcgagaagaatggagctccacggtgtgatcctgacgctaacccagcggagtacatgttggatgtgatcggtgccggggcgacggcgaccacgtcgatcgattgggctgctgtctggaggcgttcttccgaagccgagaagctccagcgagagatagaacagattcacgccgaaggccgagagcgtcctgttcaccaaagcgacattcattcagaatttacgacttcttgggcgcatcaattcgtcaccttacttcgcaggagtttccagaacatttggcgcgatccggtgtctgtctttgcgaagatcgcgttgaacgtcgtcgcaggactcctcatcggtttctcgttcttccacaccaaggatgatgtccagggttcccagaacaagcttttctccatcttcatggctatcatgtgctccatccctttgggccagatggtgcagaccgttttcatcgacgtccgagacgtatacgagatccgcgaacgccccagtcggatgtacagctggacggccctcgtcacctcccaaattatctccgagctcccctggaacatctttggatcctccctgtactttgtctgctggtattggaccgtcggttatgagaccagtagagcgggctacacgtacttgatgtacggcgtcattttcccggtctactatgtgaccatcggtcaactgttcgctgctatgtcacccaatgctctcatcgcatcgctgcttttcagcgtcatgttcacgtttgtactcatctttgatggcatcctgcagcctttctcgcagttggggtggtggagatggatgtatcgagtgtcgcctttcacgtacttggtagagggtctgttgggacaaggcaagttcccgtttattccttcaccatcttacccacggcttaactcccatttactagcgatcggtcggcagaacatcacctgcgcatcacaggagctcgtcacgctcaacccaacatccggcttgacgtgcgctgcatacctagagtcgttcgtcgattcagttggtggatatcttatgaatcccgacgcgacggatgcatgccaatactgtccgtatcgaacgaccgatcaatacatgttgaactccttcaacatcaagtacaaccttcactggcgagacgccggaattatgcttggaacgattgtgttcaatgtcttcgctatctatgcattcacatatatcttccggatccataccggaagctggattaattggaaaaagacagcgagtgggaagaaatag

SEQ ID NO: 222 - DNA, 1536 bp, Hydnomerulius pinastri
atggtgtggtttgccagagcttcagagagcacggtcatggactctgcgcgtagccaaattctgtggttcttgcccctattgggtgccgttggtgttctgctcagcagttaccgcaagaaacgagcacatggcttgcctttccctcctggtcctggtttctggcatgctgcgaaggacctagtcacaatggactcctcgacgccatggctcttgtttgtcgagtggcacaaacaatatggacctcttgtgtatgtggacgttggccaacccatgctaatcatagattcagaaagcattgcgcgagaactactcgagaaacgtgcatccaagtattctagccgccctgaatcaccaaccttcgagttatacggatggggcttcacgacagcgttgctgccttacaacgacaaatggaggcaacaccgacgattttaccagcgcggcttccgtccagatgtcgcgatgcaatggcgtccattccagctgcagaaggctcgtacgttgctgctcaatcttctgaacagcccagaggaccatgtggagcattttgctacattcactgcctctaccatcatggcgattacatacggctataccaccgctccacacgacgacccacttctcaatatcgtcaatcgcgccatcgctatctttgtcaaaagcaccacaactttgaagcttgtaattttcagcgcgttcaccttcttggagtcccttccaacttggttacccggactcggcttttatcgtgatgcctcagtttctcggaagctctcacggaagatgctggacgctccctttgagtttgtgaagaagtcaatgggtgacggaacggcgcaagtatcgcttgtttctgagtttcttgctcagaacgatgagggtactggcccgcttgccagcgaagagactatcaaggaagtcgccgctagtggcctctcagccggtatcgagacgacctcttcgtatgtgatggtgtttctattggcaatggcaacgcacccctcgatccaagaacaggctcaggccgaaatcgactgtgttattggtacgggaaggcttcccgattttgacgacaggccttcactcccgtatgtcgaggctgtactgcgagaaacgttgaggtggcaattggcgtctccgtttggggccccccatactaccaccgaggatgatgtctacgatggtgttctcattcctaaaaacaccattgtcacggccaacatatgggctattacacacgacgagtccaagtatcctgacccacgcacattcaacccttcccgcttcttgacgccggagggcaagctgaatgacgacgacatgcacattgttttcggttttgggcgccgaatctgtcccggtcgccatgtcgcagaagcatccttatgggttgccattgtctccatccttgcggctttcaacgtccgcaaggcgaaggatgagaaaggcaatgacattgaaattactcctgcaatgacgcctgggcaggtcgtgtgcgtacttgctgttccatgccatttccctccctctttctga

SEQ ID NO: 223 - DNA, 1521 bp, Hydnomerulius pinastri
atgaacgtcgtgcgcagtcaaacctttctgtggctcttgcccctactgggtgccgctagtgttctactcaacagttaccgcaagaaacgagtacatggcttgcctctccctcctggtcccggcttctggcacgctgcgaagggcctggtcacaatggactcctcagcaccatggctcttgtttaccgagtggcacaaacaatatggacctctcgtgtatatggacatcgcccaacccttgctaatcacaaattcagaaagcattgcgcgagaattactcgagaaacgttcatccaaatattctagccgccctgaagccccatcattcgatctatatggctgggggtggaccacagtggttttaccttacaatgaccgatggagacaacaccgacgattttacatgcatggctttcgtcccgatgtcgcggtacaatggcgtccgttccagatccagaacgctcgggcgttattgctcaaccttttaactagccccatggaccatgagcagcatgttgctacattcactgcctctacagttttgtctgttacttatggctataacgccgcatcacacgatgacccacttgttgagctcgttaaccaagccatggtcctcttgatgaagggcaatgaattttcgaaggttatttttttcaccatgttcccctttctacaataccttccaacgtggttgccaggcctcggcttctttcgtgatgcacaggcttctcgaaagttttcacggcttatgttggacgctccgttcgagcatgtgaagaaatccatggtctgccgcacaaatcttttaacagcgttttgtattaatatgatctatctaaaggcggatgggaaggcgcaaatatcgcttgtttccgaaattctttcccggctagaagaggacggtggaccatatgagggcgaagagactgcttcatatttgatgaccttcttactggctatgaccatggaccattccattcaggagcgagctcaggctgaaattgataccgtcgttgggaaagggagacttccagactttgacgacaggccatcactcccgtacgttgaagccctgctacgtgaactaatgaggtggcaccaagtaatcccattcggcattgggcatgctgttaccgaggacgacgtctacgatggtgttttcattcctaaaagtatgctcactataccatggtcgtgggctattgcacacgacgagtccaagtatcctgacccacacacattcaacccctctcgcttcttgacgccggagggcaagctgaatgacgacgacatgtacattattttcggttttgggcggcgaatctgccccggtcgccatctcgctgtagcatccttgtgggccgctattgtctccatccttgcggctttcgacattcgcaaggcgaaggatgagaaaggcaatgacattgaaattgtgcccattttcgcgccaggggcctcttcgtatgtatctgttttcgtgcattgttcctcggtttctgaacatcgcctgggttga

SEQ ID NO: 224 - DNA, 7959 bp, Hydnomerulius pinastri
atggcacacaggcaacctctagacaatgttgctcgggatgcccccagctacacaaatccagaccctcgtgccgtagctatcgtcggcatgtctatcagcgcgcccggcggtgttgactatggtcttgataccgaagaattctatgctttcctccaaaatagaggatctgccatcattaccgttcctactaaccgctggaacgcggaagcctttcatggcactgggccgggcaagatctctactacaaagggagggtttattcctgacattagatatgccgacctccaagagttcggtattactcctgtggaaggccaacagatatctacttgccaaatgcttctgctccatcaagcgttcacggcgttgcagcgcagtggagttgattatcgtggtacaaacactggggtttacgttggctccgcatccggcgaaggaactttgtttgaaatggacatagcacaggcaggcccgtattacatgactggaacaaccaactcgatcgttgcgaacagactgaactacgtatttgatctactcggtccttccatgcccatagatactgcgtgttcgtcctcgctggcagcgatgcacgtcgccgttcaagccgtccgcaacggtgaatgtgaccaggctgtagtggccggtgccaacgtcgttcgaaacgcactcgaatgcgtagcgttcagtcagttaggtgtgctcagccctgacggcatatccaagtcctttgatgaagatgggaatggatacgcacgtggtgacgtcgccagcgcggttgttattaagcgccatgatctcgccgtcaaagatcacaatcgcattcacgcgacgcttgttggtaccgccctgacatcatgcggatccatcatgggttccctcacaaccccgagtcccgaagcgcaggcttcggcgatccagcttgcatatcgagacgccggtctcgagcctcatcaagcagatttcgtcgagctccatggcacgggcacggttgtcggtgacgcgacagaagcgaataatgccggcgccgtctttgcgggggggagagatgcaagggagatcctcattggatcggtgaagagcaacgttggacatggtgaactaggcgcgtatatgacatcattagtgaaggtcgcaatgatgttggaaaggaaggaagtcctacctaatggctacttcaaaaagccatcctcccgaattgatttcgaaaagttcaagctgcgtgttcccgtgtccgttgagaatttcgcacctggcaatccccaactcggtcggattgcgtctatatctagttacggatttggaggcgctctgtcgctgaagggatgcgttactctcagcgagaaatacaaagaagagtgcgctgaagttgagcctctcgccctgtgcgagcacttggcaaaccgtacacgccaactcccatggaggtccttcgcaatcgctggatccatcgagacagcgacgttccccgaaccagtcctcgtacctaaacgcccccatcctctcgtcttttgtttctcaggccagggcccccaacactggcagcaaggccgggagctatatcatactttcaaggtgttccgcgatagtatcaatgactgcgacagggtgcatgtcgattacacaggggaatccttcatcgagacgacaggcctgttcaagaccgatgctcctaaggactcggacctggctaccagcttaacatggccttccgatgtcacttccatttctctcaccttcttccagattgcgctcttcgacctcttgagttctctgaatcttaagccagatacaattgttggacactcagttggagagacagcagtcttatacgcttcaggcgcggtcccacgtagcatggccgttaaaatcgcgatcgctcgtggaaaagctcttgccatggttgacaacactggcggcggtatggtggctgtttctggatgcgacgcagacaaagtacgcgactacgcggaaacggcaattacactagctgtgcaggaagtcgactcggcgggtggtccccagctgttccttgcgtcattcaacagccccacagatataggcgtatcaggctccaagaaacatcttgaggtatttgcaagcttcatcgaaagatgggtgagcgatgtcgtcgcgcgcaaacttcgcatcaacaccgctgtccactctcccttcgtccatccctgcgagtcgcaataccgccgagacctagctaccattttcgcggagtatccaggtcctcacatcccaaagatcccgacgatgtccacggtcactgctgagttcaaaacagactcgtatacgcccgattatttgtggaacaacctccgccaacctgtgcttttctcttcggctatccccaaagtagttgagagactcggagaattgaccacgtttattgaggtcgcccctcatccagtcctgtcccagtacctcaagcagatgggtgcccttgatgctctcgcctgcagcagacgtccaccgtctgcccgccatgtaaaacctgggtcgagcgctttggtcgaagtacgcacattgctggaagttttgggacgtttgctgttagtcggcgtcaataagatcaacttctcggagtttgccggatgcccagatgcaaacatcgagggtcccgcatatccgttccagccaaagttatggcgctatggcatggatgaaccatcatacgtccgtaagctattacccgcggaaaggtctttgaattcgattcggctacgcgtcagcccaattatgcccgagccgtggatgggtgatcatgtcattgatcatacgaatctggttcccgcggctgcctacctagagatggcccttgagttccccgatgttactcagctgtatgattgccgcttcgaggctatgtatgtcctggaagagtcaggaccacctgggacattggaagtttcccgggaagggaattcctggtgggtgaagtcatcatctcagatgcgcactccgcagggggacaaggagtggacgaggactggtccttctttcgacactctccactcttgcggcaagttgggttatggtccccctgaaatcgagccggatgcgatcacacgcgtcgatcttgaggaagtgctgtctcgctgcccctacacgttcgatcgcgacgcctttaacgatcggatggagggtgtggtacaatttggtcccgagttcagacgaattatgaaagcggtgtgcaatgaaaaggaagtcctgacatatatcaagggtcatgtggatggcctgaatcagacagattatgccttccatcccgccctcttagatgccgtcttccagtcgcctctttcatggggcctgatcggtgataagctgcatctcggtaggaagaatacccagctactgctgccacattctgttcgccgcatattccgcaatgatggcagtactgctccactggtgctgcctgatgaatttgtagcttataccgtcctccacgagtggtcgcctcaccactgggtgacgaactgttatatcttaggtgaagaccagtcggtcatatataccgtggaaggacttcgttttgcgttggtccagcatgacaatgagtggcctagcgaacacttcaagatgttctggcaacctagggacttgccacagtcgcatctggaaagctcagtcattcttcctggtccaccaccgcattccgatgatatagagttatttggtctacctcacgacttcgctcctacctcgcctgaccgccagcgctacttggcttgggcaaatgcggtggccaccagactgaccgcgaacaacgctgatgtgccagcagtccctgctcatttgcaagaaaagtataaagctttgttcgacctgactcagagggtcggtgctggacaaaaagctgccgccgttgagctgcttttctatgacgacatcatgagcaagatctacgagcatccacctttcatcggctctgtattcgatgcgaccacgtcgcgtttcatcgaccttgttaccgacgcactcaatgctggcaagcaggtggtccgagtccttgaggttggtgcgggaactgggaggttcactgcactgctcgggcgagctcttttggaagctgctttgcctgaaggctgctacgtcgactacgtctgcaccgacgtcagtatttcgctcgcacaagaggcgacagcgaagtccccttggccaacggtaaccgccaaagcccttgatctgaatgtcgcgatcagcgaacagaacctagatccccgcagtttcgatattgtcgttgcctttgatgttctgcacgctatccctgacattcacgcgagtttgacgacgctccagcagctcctctgtcccggcggtcacattgccatcttggagttggacggtggttccaaacctgtactgctccgacacttcaccgctggaggggaagttgcccttgtcgacttcatatcatcgctggattcaacatacccctacctcttctggctatacaccactacttcccccggcgatgcagctgcggttggactagtgagaactctccgccaggaatacccaacctggaagattcacctcgctctcttccccgactcctggacggtgacagcccaagaggcttatgtgcactcacagctcatactgttgccgtgggtggactctgaagtgatgattgaccaggacgggaagatgcacgtgccgcgtctggtgaaggcctctcccgccgctcgccaggaacttcggggctctcatccagtctcattccggggttccgatgtctggcgagcgtacccagcggagcttggtccgaatgatgttgaagtgtccgttcactatgttggattgactccggctatgtctggatggaccgaatttgctggagcggtgacagccgtcggctctggtgtacttgaagaggacctcgtcgggcgcagggtatttggtgttactgtttctgtccccggaagtaccatcgtctgcgatcgttccaagcttgcgttcgttcctcaagacatggaaactgccctggccaccgctttggtgggaaggcttatgttcttatcattggtcgtggtcgataccgtcggcacctcttcgaagaacacaaaggtcctcctccacgctggccattgttcaccggccgcgctcgcgacatacgcttacctaagtgccaactccttcaacgttactgtcaccgtcagcgatgcaccaccgtccaccaacaccttcagcacgctgtccccgatttcatcttccaaatactatgcctggtcatctcgtgtccgcgcttgggctccacgaggcgtagacgtcgtcttcaattttgacgaggatatcaacgtggcgaagcaaacgctttccttgctttcttctcgggggagatttgttcaaatagggggagagctgcccagctctcttccttccggacgtcgctacgtatcaatcgaagagcatgctgttctagaagctggcaatgatctcgatcgcaccgacgctgttttttcacccgctgtccttgctgccctacctcctgccgtggacatttacaacctcccacagctcatgaccgccgacgtccaagcacgcaactcgatgccaggccgtgttactctggtcgacctgcaagcgattccccaggagcttcccgttttgaaagccggaatgttgaaagggacggctgttttcaatcctcgagcatcctatgtgattgtgggtggtattggcggactgggtgtcaacattgcacggtgcttggtggaaaatggtgccaagcacctgattctgacttcgagatctggggagaagggaatcgcgactatgcaactagcacgcgagaaaaagattgtcaattatcttcgaggaattcctggagtaaccgtcgatcttcgggcggtggacgttcttgacgctgagaagaccagagacttgttcatgaacctggagcatcctgttgccggggtgttctatttggctgtcaggctcaacgaccaggtctttgcgaatttgaagacggaggaagactggaaaattggcaagtcggctatcttgcgctttatttacgacgtcaagatcaaaggcgttgaagttctcctgcaagcggtcaaccctcagtcactggatttccttgtcctcacgagttccatggctactgtgtgcggctcgccaggccaggcgaactattctgctgcccagacctacatggagaccatggcggcagcgcttcccaataccgttgcaatcaccgtgccccctatcaccgatggaggtgtgtttgtccgaagcctgcctccaggtaacgcacgcaatgcagccctggacaaatacaaatccctcggaatgactggctaccttgttgcgcaacactgcgtgaatgccatctggacgctgaactgcgatgcctatagcccagtctatattcctcccaccgactggaaagagatcatgcaacttggcatcccggaataccacttgtcgtccctgcgtcatttgttgaccaagcaaaacgttgagatcgcgctggcaaccgaggagtggtccattcgggcggcgtgcgcatcggtgttggctcttgataccaacgaggttgcagacaatgtcccgctttcaagctatggtcttgactcgctaacatccgttcgattgagtgggattctcaaaaccaacttcaatgtttccgtgactcagcttcagcttctcggaaacagtatgactgtccaacgactgatggctctgcaagaggagctgaaggccgattcatcttctgtggctgtggggactgccaacaaggactcgctcgacatactgggagccgaaggtgtccatcatgctgacatggacaagacgatcgttcgattgaacaacgtcacggatggacaacctgtattcatcgtacacggcgctggcggcggcgtcctcgtcatgctgaaaaccgcggaaatgatgtcttgtcctgtttatggtgtccaagacactccagatgcgcccattaccggaaccctcgacaaactttgcaggttctacctggagaaaatccgagagaagcaacccaaaggtccataccgccttgggggtttctcattcggcacctatgccgcttttgtcatcgcacagctgctgcaagaagaaggggagacagttgagctgctcgtcatgatcgatgggtcgccagcgattttcaccaacttcgccaagaggatcaatgtgaccaatatgcgagacgaaatcatgaccgttatccgtgatcttgccgcaagcgggacgctggaaagtggcgaggaacttaccgccatgtttgaggaccacttcaagcaagttgcgcagggcggttctagcggcaaatttgtgtcccagttcggtcgtgcattcgtcgcacacgtgctcatggcggtccgcgcttgtatcccagcgatcttacgggagcaagctggggagatcgataactctgtctggccgaccgcgagaacggtcgttatccgtgcggaagatggcattggtcgtcaatccgtgtcggaaggactttcccctgcttttgatgtagaattacgcgccccagatgcggagttttacatcctaccgggaacgcacttcgggattctccacccccagtctgggctccctcagcttctcgaacaggtggagaagtgtgatcacccaaaagtgataccaccgacgatgacgatgatgaccggaactacgatttctgtgggaaaacacagaagtcagtcatccatcgacttaggctgctctgacacggcgagggcacaagctgcgaaagaagtttccgggatcatggtgtcatcaatgtggaggagctggacagcgaagagcaccaagggtgtgacagcttcggcattctcagacagcatcagggtctccgcctacaatgcgtcccccagtaggctcctgctgccttcattgggggctaatgcaggccctcaatgcgacggcggacgaaaatggtaccaggccccaaaaatgacctag

SEQ ID NO: 225 - DNA, 1551 bp, Arthroderma gypseum
atgccgcgcttcaaccccctaagcatctcctgtctggctactctgctgaccacctaccttggtacagcatctgtatctgcacagtcaccaccccaggaaaccctctggccggtgcagacgttccagagtacggatatccagacgccgtttttcaatgtgacgaagaaaggccagacggaaccgggctatatcttcataagcccgagagataaggcccgaaacattggacatccagctatcctcgaggacaatggccaggttgtctggaagggaccggaagacgcgagcacatatggcttcaagcctcagcttcttgacgggaagccagtgctggttagctggttcgggttcgtgaacgagactggattcggactgggatctatgagcatcttcgacagctcgtatgagaagatccacgaggtgattctgcccggtggtgataacgaatactacaagacgatttatgagcccatgacgttcccatcatacatggacaaccacgaaggccagatcacggaccaaggaaccatcgttgtgactgttgtcaatgtcactgaggcagatctccgtgctgttggcgggcctgagaagggctgggttgtcgacggaggctttttggaaatggacatcaagaccaacgaagtcctcttccgctggaatgccgctgagcacattgatgagatccctgtcactttctcccttaagccaattgagggaactggaacttcgcccaaaaacccatggaactacgtccatgtcaactccgtcttcaaatccggagactcttatatcgtctcttctcggtactcctgcaacatcttcctcatctccaaggaaggcgagattgtctggcgcctcaacggcattgatggaggtgacttcgagctaggccccggcgccaacttctgttaccagcatgaagtcagggtcgaatcccacaccgtggacaagatcacgctgactacacacaacaacgacaacgccgacttcacgcctgccaatgaaaccaaaccgacaaccggtctggtcctcgatctcgatctcaacgccaagaaagtcactttgaaccgcatggtatggaactccgagcggcctgtcgtctctcggggccaggggagctaccaggtgcttggcaacgaccacgtcctgatgggccagggcgccatccccatcgtagaggagtacgatgccaacggcgccgtcgtaatggacgcccgtttcggcaacgacggcgtcaccaactgctaccgcgcctaccgcagcgcctgggttggcacacccaagacgaaaccgagcgtaaaggcctgcggtgccgatccgaacggcgcggtggtgttttatgtgagctggaacggcgcgacggacgtagagtcgtggaagattttctctgtctcggactctggcgagcacagtgagatagctaatgtgccgaaaaatggctttgagacgaggatggagctgcagaaggctggcagcaagttcatcgtccagtcggttggaggacctaacgacggggtgcagtctgatgttgtcatgggcgaaaactgctag

SEQ ID NO: 226 - DNA, 1860 bp, Arthroderma gypseum
atggacgacttgctggctctcgtcgagggtggccctgcgctcaagccgacgatcaactcactctggacagccctgcaccagcgtgccagcatacagccagacagactggccctgctgagcccccggcagcctggaaacttgctcgaaggactcgtccggcctagaggaaggagagatgagagtggcagccgcgatgccctcatgcgtagcctcaagcgagcagccacaccggcgtacatgctcagctacctgctatcgtgggttctgccggcgcctgatacagagacagactacctcagatggtcctttgcagagctccaacgtgcaacaattcgtctagcttcttttctgcgtcgtcgtggtgtgaagccaggggcgacaggcgccttcttcaccccggtctgcgcagaatgggcgttgatgctgtctgtgtctgcgtacagtcgctacacgggtgtgacgctcgaccggaagacgctcgcgcctggtaatgagcacgacctgcgagtacatatgaacacactaagcccgtctttcattatcgttactacggtagaggaagcgctgcatcttgctggacagacagatgtagcactcgggatctgcttggagaacttcgcgacgcctgctccggagggctggctgagcatggcagatattgcagcatcctcatatgaagaggaagaggaagaagaagtagaagaagcagaagaagtggaagaaaagagagaaagtgacaggacagccttcgttgtgtttactagtggctcgtccggcatacccaagggctgcccagtgtccgccagccaaattctatctcttctcggagctgtgtccaagcagatgcctctcctaccaactcctatgactcttgtctcgggcacatgcttccggtcgctctgcacagccatcacactgatgtcctgggcctcaggcaacgccgccgtcatggacgccagcaacgaggcgacagctgagacgaagctcgctgggctgcaaacatgccgacctgcctttgcctccgtaaccgtcacggcgctctcctctattgcccgtagcccaaactacaccgccgacgccatcaggtcggtccgcttcgtccatctcatcggctcaactatgaccgcgtcggtcctccgaagggccaagaagacgttccctcacgcaacgatcctgcccagctttggcatgtcagaggccgcaaagacagtgacctgggaagctgccggaggtgtgccatccgttgacaagatacctacatggcacggcatcgccgcctcaggcaaggtggctcccggcgaaaggctcaaggtcgttgatatagacggtaacgttgcacgccgtaatcatgttggtgcgttacacctgagcggcgactcagttatcggtggttacttgggtggtgccaattctgctgccttttacgtaggagacgacggccaccactggttcgtctctggggacgatgccgtgattgatgaccaaggccttctctatgtcctcggtcgaagtgagtatactctcaggcgcgacagcaagctcatcctcccctgtatcgttgaaaattttctcgagacgcaattcgaagggtcctcggctgccgtagtgaatatcaccaccagcaacggtgataggggtttatttgctgtcttagagcacgctgtccctgcccctgcatccgctgctgttcaagaacttgtcgctcaaaagcttggcttggaataccgtgtcgaaggtgctgtgagcctcaatgagctaggattcgagaagtggccgctgacctcgggagaaaaagtcgcctaccgtgatttacggctcgccattgaggaatttctcacttccaagacggcaaatttatga

SEQ ID NO: 227 - DNA, 6939 bp, Arthroderma gypseum
atggagaagccgatgcctattgccatcattggcatggcatgccgcacttcgggcggcgttgcttcattagatgaattctggacgatgctctctcgctgcagagacggctctggtccgattccaaaggacagattctcctctgctgcatactatcaccccaatccgcaaaagcgaggcacattcaaccagcttggaggctatttcatggacagagatgtgtcctacttcgacgccccgttctttaatatcacaaggcaagaagcagcttcactagatccgctgcaaagacaactcctcgaaatctcatacgaagctctagaatgcgccgggcttcctaagaacaagatatcgggagagagcatggccgtcttcgttggtactaagagatcagactaccgatgcaactcacaggacgtgaagcgaattgaactgtttaacgcaacaagcgttcacccggccgttcaggcaggccggctatcctactacttcaacctcaacgggccctgctgcgccgtcgacacagcctgctcttctgggctgcatgctctccacctaggcgtgaatgccattcgtaatggagagtgcagttctgcgcttgtggcggctgctaatttgtatctcaacccggatgacctggtatccatgtcgatgctgggcctatttactcctgcgggcaagacatacgcctttgaccaccgcggaacgtccggctttgcctgcggcgaaggcgcggcagccctcgtcatcaagccgctggatcgggccattaatgataacgacaacatctactctgtaatcgtcaacacaggaatcaaccaggatggcaagacggctggtctcacaacgccgagcagtgaaatgcaagagaagcttatgcgtgacgtatacaggcgcgcaaacatcagccctaatgacacagcattcgtcgaggctcacggcacaggcacaaaagtaggagatcccctagaagttgctgccatccagcgagtgtttggcaacgggcgtacaaagcgcagcccgctatatattggctcagtaaagaccaatgtcggccacctggaaaatgccagcggtctcatttccgtcatcaaggctagtcttatgctgcaccgaggcttcatcttgccaaacaccaattttgagaaggcgaatcctgatatcccactggaagcgtggaatttgaaggtccccgtcaatattcgtccctggcccaggggcaggcgctatatcagcatcaacaactttggtttcggcggctctaacgcccatgtcgtccttgataaagcgcctcccgcggttatgctcagagctattcctgtcgagccgccgggcagagaagctatacctaaactctttgtcatttccggtcacgacgagggtgcagcaagaagaaatgccagccaaattggaatctacgtcgagcagcacccggaagtctttgagaagcgcatcgctcgcgacgtcgcgtacaccctcggcgagcgtcgaactcaccatgctttccgcgttgctctcacagcgagcaatttcggtgaactgacagaagatttgaacgatgaggcactactcccacagcgtgcgtcagatgaaccacttaagctagccttcatattcactggccaaggtgctcagtggccgcagatgggcagacagttactcaattctcacccgatcttcggcctgacggtcaaggagtgctccgattttctagagaacagtattggcgctgacttctctcttatgcaagaactcttgcggccaaagggcgagtccatcgttaatgaagctcacatttcacagccaatttgcacagcaatccagctgggtctcgttgagctgctcaagtcctggaaaattgagccctccatggtttgtggccattcgtctggtgagatagccgccgcctatgctgccggtgccattacgctcagagatgctatggccgctgcttattaccgcggtcactttgccgctcagatgaagaaacgcaatcctaaagtccgtggtgccatgttagctgttggcgccggacctgcggaagtaaagagaatcatcaagtctctgagtttagccggcgtcaccgtttcttgtgaaaacgctcccaattctgtaactgcttctggtgacgaagccgacattgacagacttgcattagaacttgaaggacgcagcttgttcaaccgtaagctccgtgtcgatgttgcatatcactctgcgcatatgaagctcgttgcgaacgactacatggcagccattgagaacatgcacttcaaggccatggatgatggtatcaagttttactcgtctcttcttgggaaaaagcttgatagcactgaagcactgggtgctcagtactgggttaacaaccttatcaagcctgttctcttttcatctgctcttgaggagctctacaatgacggaaaaccagacatcatcattgaactcggtcctcactctgcactcgagggccctatcaagcaagttttaaagggaattagcaagcaggctgctacaagcgtcaggtatcattctgctttgctccgcaaccaagatgctgcggttacagccgtcaagcttgccggtaatctttggaccaaaggccttgatatcgacttcagccaggtcaatataacgttggaagggcagttggagcccggcctggtttcagacctaccttcataccagtggtcaaaacatcagtgctggacagagtctcgcgccggcaaatctcatcgccttaaggattttggtcggcacgatctacttggactcctacaggacgactgcaacgaaactgagcctgtctggaccaatgttcttgattctgatgaagtgccatggctcaaggatcataagatgcagtctcttgtcacattcccctgcgctgggtacctgactatggcaaccgaagctgcttctcaaacagcgcggatgcgtggcgtgctgttggaagaaattgcctcataccatatgcgaaacatccaggttagcaagcctttcatcctcgatgatggcgagtcttatgacacacgctttactctcaagcgttatgccgaaggtctggcagcgtattctaacgactgggatgaatttcaatactcctcttgggccccttcccgaggctgggttgagcactgccgtggcctcgttggcatcaagaagcgcagcaacaccaatattgttcgaatgaacaaccaaaaagctgctattgctcgcagggccaatatgcagccacagcctggtactgagatcgattgtgaatcgttctactcagaacttttgggtaagggtgctggatacaccagagacttcactttcaaggatggtgcaaatctgagagtcgatggtgattgttcagctggcatagcagttctccaggatgttgctgccaatatgcctttcaaccatgagacacaaagcactctgccctctgcattaacagacttgatatttcaaacatgtttcttgatcctcggtgcagggcgcggaaatctgaagagcttggtcgtgccatcggctatcggaagtgtcgagatttctaccacatgcccaaatactcccggcgagacgcttgaaatcgtgacccaccaccaaaactttgcttcaaaggaccgattggtatttgacagtgatgcatggcacacaaatgcgagtgagccggtcgttatgatgcgaagcaccatcttgacgcccattcatggtgatgcttttgaaagtcaagagccacggtctgcgtgctatagagtgatctgggaacctttggaagcccaagttgcagccaaacttgaagacaatgccgcatcagatggggcaaataaccattccaactgtcacactaatgggcacagagatggacacgccaatggttatataaacggccatgccaacggcagcaccaatggacatacaaatggccatattagtgggtatacaaacggacacaccaatggacacaccaacggcaacgccagcaacatcaacggcaacaccaacggccatacaaatggtcataccagtaggtataccaatggacacacaaacggcaacaccaacggccatacaaatggtcatacaaatggacacaccaacgggcgtaccaacggttatacaaacggccgtaccaatggacattcgaatggtggctctaatgggtataccaatggtgtgccgacttctggcgttgacttgagcgccactcccatcaccgtcatttgcgatgctggtccctcaaaccctctctgcgctgcccttgcggatctgattgagattcagacgtgtggatgcaggccaaccattatatcactagcaaaagcagagatatgttcatccgtcagatatgttgtcttgaatgaggtcgatagcccggtcctcgatgacatgaatgccgatacatttgctctgatccagaagctcctgcttgatggcttgtctatcctctgggtaagctctggtgcttatctaaatgcagagagcccacataacaacatagcccagggaatgttccgaaccattcgttccgagctgggtaaagtagcggccactcttgacctcgataccaaatctaagttgcggcctgacgatcaggcgcagcttatcatcactgcaatgaagacatccatggaaacattcaaagatgaatccatcgattatgaatttgcggagaaagatgggaaacttctcgttccccgtgtcgtagaagaaaatgagatgaatcttgacctcttccgccaaacccagtctcctcccccttatctccaaaacttcaacgagcccaaccgccgcctcaagatcgcggttggcacatacggtgcgctcgactccctattctgggacgacgaggagacatacgggcttgggccaaacgagattgaagttaaagttgctgctactggcatgaacttcaaagacgttgtcattgccatgggacaagtgcctagcccgtacctcggaatcgagtgttccggtaccgtctcacgcattggatctggtgtcacctcgctcaagattggaaatcgagtttgtgctatgacacacggtgcttatagtacttttgctcgctgtccagctactagcgcagctgtcatcccagaggatattgcattctccacagccgcttctatccccgttatcttctgcacagcctactatggcctgatagagcttgctcaccttgaacgtggggagaaaatattaattcacgcagcgtctggcggcgtgggacaggccgccattcagctctcccagatggtaggcgctgagatttttgccactaccagcagtgttgagaagaaaaaccatcttattgatacctatggtattccggaggaccatatcttttatagtagagataccagttttgggcctgccgtcagagaatctaccgacgggaaaggtgtagatgttgtaatcaactcccttgctggtgatctgctgcgagagacctgggcctgcattgccccatttggccgctttattgaaattggaaaacgtgatatcacctccaacactcgactggaaatggacaaatttgaatacaattgctctttccactcggttgatttgtccaaggttgctgactggcgaccaaagataatgagtcgagttttcaaggaagtcatggctctcatctccaaaaggattatccagcccattagccccatcactgagattggcatctctaaggtcgaagctgcgttgcgcaaacttcagagcggcaagactaagggcaaggtcattgtcaaccatctcgtcaatgagcaggtcaatgctgcccacagacagcctaccggagacctagtgaatggaaatgccacttatatcatcattggcggtacaggtggccttggtcgttccatggcaaagaaaatggctcagcgcggtggaaagcacgtcgtccttctatcccgcagcggcaagatgactcctgagctagatcatctcagcaaagaatgcgagatatatggagccaagatctatgtaaaatgctgtgacgcggccaaccaggcaaaagtcaacgaacttatctcagagctgcaatcgtcactgcctccgatccgtggtgtcatccatgcagccatggtgctgcgggataccctctttgaaaagatgtcattcgaggactgggatgaggttgtgcgctgtaaggttgcgggaggctggaacttccacattgccttagcaaaggagcccctcgacttcttcatcgtcctatcctcggttgctggcattgttggcaaccgcggccaggcagcctacgccgctgccaacaccttcttagatgccttgacagtccaccgccgtaggttgggtcttaaagctacatcgctcaacctaactgcagtcgaggatatcggttatctggcggagaattccggcaagcaaggcgaagttcttcgcaatttatctggtaacggaattggcggggccgaagtcctagcactcatcgagagttctataaacggcaaggttggcaccgcctgcgacgaccagtgtatcaccggacttgaattcggggactcgatgccctactttgccgcggatggcaagttcaagtatcttcgtcaggctgctcttgcgctgagcgctgctgcgggtgatgacggtggcgcgaatattcctattggcaagagactagctagggcgatgacagtgggcgaagccgtcgagcttgttaccgatggcttgcgtgacaaactgggcgccattctgatgcttgaccccgatgtcattctagctaaacaggcgactgtcaccatggctgcccttggcttggactcactcaacgctatcgagctgcgtaattggatcgcaagggacctgcagacacacttgcagatcctggagctgctgcgagctggaacgttggctgatcttgcaagtcagattctgaagaagactcgcatccaaggtgcttggacaatgcaggagggagccagataa

SEQ ID NO: 228 - DNA, 762 bp, Arthroderma gypseum
atgaagatcctctgtatccatggctcgtatggcagcgcatctgcctttcgcacccagctcgaaccctttctcgcccagatagagaagcctggggaggtggatttcaaattcatcgacggcctctatcctgccgtgcctccagatggctttcaggactactttggcccgccacctcacttcctcaacgttcaatacgacggtattgctggcttagagaacatgcaattgaacctgcgtacactcaaaccaggagaaagcttcgaagacacaataaagaggcttatcaaaaatgatgccacagtcgtgtctaaagaagaatatatgaagaccctcgactacattgagcagtgcctggtcgaggatccagaaattcagggaattcttggttactccgaaggtgctacgactgctgcaacatatttgttacagcaggcacaccggcaccgagacgaaggcatcccacacagggtcaagtttggcatcttcttcgggggctggccgcctgcaaagttcgaaggtgaccgccttgcgcccgtcctacccgaggacgatgatatgattgatatcccaacatgccacattgtcggctgtagcgacccctatctttacggcgccatgaccctgtttcaggtctgcgatgaagagacagccaccctattcgatcatggcaagggtcatttgctgcctcgagatcccatgaccattgccgagttatcagaatgcatcaacacaactctcaagcaggcaggtttccttaactag

SEQ ID NO: 229 - DNA, 879 bp, Setosphaeria turcica
atgtccaaccgccagaatatcgaattcaaaaccctcagcggcgtcacgctgcgcggatggctgtatccgagtgaaacgcaaaagaaaggaccgggcattattctgtcggctggtttcaacatgcccaaagacgtcgtcgtcccggacgtcgcagaatggttccagcggcacggcttcacggccctggtcttcgacacgtttggcattggcgagagtgaggggttgccgcggtgtgataccaacatgcaccgccgcgtcgaagacttcatcgactcgattacttttctcagtagccacccgctcgtcgacccccagcgcatcgtcctctggggcctctgtttcgacggcaacatcatgttggcggtctcggcgctcgacacgcgtgttgctgctgttctcgccatcgcgcccatgatcgacgtctcgggcgactcggagcggcacgccgcaatccgcgaactgggcgtcgcagatcgcgcagcacagctcgacggtgaaccgcccatgtacctcccgctggtcgacgaggacgggattatgccgctgggccagacatctggcctgggcttcttcactaccatgcagggcatgcagcttcccgttgagaatcgcgcgacggtccagagttacctgcggggcttatcctggagtatcgagcatttgctgccgaggattagtcccacgcccgtcttcatgctgacgccagagctggaccaggtgtttgctgcggagcgccagaccaaggcgtttgagatgctgggggaacccaaagaacagtttttggtcgagggaaaggatcatttcaattggatgtttggcgatgtggatgccgtgtttgggaggcagttgcggtttttgaagaggtttgtcgcggtttga

SEQ ID NO: 230 - DNA, 1062 bp, Setosphaeria turcica
atgaacgctcttgttggcgatgaagccggcggctaccgactcgcccataatattgagattccgtgcccaaaacccggcaccatgttgtgtcgtgtgcacgccgtagccgtcagtccgtacgacgccaagatctccgactactccaacatccccggggccattggcggctgcgactttgcaggcatcgtagtcgaagtcggcgacgacgtgaagcgcttcaaggcaggcgaccgcattctcgccgtcacatttggattgaatgcgctggacaagtcggctggtgctttcgcagagtacgcgcttgcgactgaagacctcgcctgccatgttccagatgacatgtcgctgtcccaagcaagctccgtgggtctcgctgttgcaacggctggtctggctcttttccaagcccctggattgcaactcagcatgccgcgtcgcgagacgccagagcaagaatcaccgccgtttgtcttggtttccggaggtgcaacagatactggtaccatggccatccagcttttgaaaatcgcgggctacacccccatcgtcacatgctcaccccgcaacaacacactatgcacatcctacggcgcggctgcctgtttcgactaccactctgcctcgtgcggcgccgacatccggtcccacacatccaacagcctgctgtacgtcttcgactgcgtcaccgataccgagacaatgcgcatgtgctactcggcgctggggtcctcgggcggcaagtacatcgccatcgaagcgctcgactgcgccatcaaatacacgcgccgcgacgtcgtcgccgactggctcatggcacccaccatcatgggttccccagtcctgatttcaggcacctacggtagacccagtacgcctgcgcaccgccgctttggagctgcgtttttcgccctcgtggagacgctgttgcgcgagggaaaactcaagggccatcccgtgcagatgagagatggcgggcttgcgaagatccctacgtatgtggataatgtgcgggtgaggggtgttcaggcccagaggcaggttgtgccgttggttgttgagtag

SEQ ID NO: 231 - DNA, 1278 bp, Setosphaeria turcica
atgggctccttagcacccgctccatccgtagccatcattggcgctggccttggaggactcacactcggtcttgtcttcaagcaacatggctacgacccaacattctatgaactgcgagaccctgattacgacttaggtggcgccatcatgctgcagcccaacgctctgtgcgtcctggatgctctcggtgtctattcccgcgtcaagtcccggggctttggcgcccaggtcatcacattcctggctgaccctgacctcgagtacacaggcgagtactggtttggacgcgaagacatctacgggtacgacgcgattcgtctttcacggcaggttttgatccgcgaactaagaagcctggtcaaagaagccggcatggaaattcactatgagcgcaagtttgaaaaggtggtgacggaagacgagtcgggcgtgtgtttccagttcgcagatggcacgcaggagaaagcagacctcttgattggcgcggacggtgtgcattccaaggtgcgcgcgtacatgtatccggatgtgcatcctacatactccggcgtctttggcatcacgtatgctttccccacggccaacctctctctgctgaccccggactttccgcttccggcctcgattcagcacaaactgggttccttcatcatggcgccgcagaacgacggaggacacgagatgtttgcagggcgacaatacaagtacccgaatcaggatcgagcgggctgggatgcattggcaaatgataaagagaagcttatggagatgattcagcgcagcacggaagaatggtctccactcgtccagtcggtacaagctcaagtcaggagcccagacacgcattccctgtccatctggcagttcgacagcgtccccaaaatggagcgctggtactcatccaccgggcgggtcatcatgctcggagacgccgcacacggcattccaccatccataggccagggcgccaaccaagcctttgaagacggatatagtcttggtttgatgctagcaaacgccgacggcaaagtcgcattgacagacgcactgaaggcgtggaacgactaccggcaaaagagaatggaaaaggtactcacgctgacgctgcaggtgctttcgatgcgaatgtccaacgaagagaaggcaaagattcctgaggagctgaggtgggacgacgatggaagcgaggggggcaagacaaagctctcgtggctgtatgtcaacgacgtgaagagcgatgttgaggcgctgctggaggagctgggtgtcgagcgctga

SEQ ID NO: 232 - DNA, 1695 bp, Setosphaeria turcica
atgtctacaactccgtcctacccaaatggcgacgaggaaaaacaagttgtagatatccatgaccaatccgtcagctcatcatctagcaccggccccgaatcagaaaaacctcgactcagcaaagacagcgcaggtgcggaagaaggcggagccacagagtcacaggatgccggcgagtacgcaactggagcgaagctcttgattatcgtccttgccctagtcctcagtgttttcctcttctctctcgaccagacgattgtcgcgaccgcgattccgaaaatcaccgatgattttcgcagcctcgatgacatatcgtggtacggctcagctttcttcatgacgctgggagggtttcagtccatgtggggtaaagcgtacaagtactttcccctcaagattagcttcctgttggccatttttgtctttgagctcggaagcttgatctgcggtgtggcaccgaattcgctgacgcttattgttggtcgcgcgattgctggtgttggtgccgcgggtatcgggtcgggagcgtatacgattgtagcctttgctgctgagccgaagaagagggcgacgtatacaggtatcctgggtgcggcgtatggtatcgctgctgtggctgggccgcttgttggaggcgtactgacggataaggcttcttggcgatggtgtttctacatcaacctcccaatcggcggtctagccgctgccaccatcttcatattcttccagacgcccaaagccgcgaagcccgtcgacgctcccctcggcgagaagctcctacagatggatcccatgggtacggttctcatcatgggcgccgtaatcgcgtacatcctcgctctccagtacggcggtgcaagggaatcatggaactcgggtatcgtcattggtcttctcgtcggcttcgctgttatcctcattgcctttggcgtcttggagatctggcaaggcgagcgctcgatgctcacaccgcgtctgatgcgcaaccgatacgtctgggtaaacggcttatttgggtttttcttctgcggcgcctactttgttccgctgtactacctgcccatttactttcagagcatcgacaacgtcagtcctacggcttcgggcgtacgcaatctgcccctcatcattgcgttcagcgtcggtgctgtgctttctggcggcgccatttccaaaaccggtgttgcgactccaatccttacagttagcgcggtcattacgacggttgccgcaggtgcaatgtacactcttgatattggcagtgggactggtaagtggattggatttcagatcctgtcgggattgggattcggagtaggtttccaggtccccatcatcgtggtacaagctactgcacagccaacggacctggcctctgtgactgcgattactttgtttttcgaaactgtcggcggcgcttttctcgtcgctgccgctcaatccggtttcgtcaaccagctcctgcacaaactcgcctctactgccgctggcgtaaacccagctctcgtcgtagctaccggtgccactgatctgcacagggttttctcaggtgatgagctgaatggtgttctggtcgcatacatggctggcatcaaggtcgcgttcgctattacggttggtgctgtcggcatctcagtcccgatcagcttgctgagcaagtgggggagaataaaccagcagaagcctagtgtgtga

SEQ ID NO: 233 - DNA, 1212 bp, Setosphaeria turcica
atgggagacgcatcacccgattccaactatctcattgagcagctcaatctgctggttcaaagtacagagactctaagccgaggagtcgacgaaacccaacgtctagagcttcagcgcctcactcgccttgcttcggtcgctttggaaacaccacccgagaccacggaacgcgtcatcttcgcatacctacctctggtcactgcacgcatcagcaacgactatggcatcctcgccaacttggtcaaaggcagcgaggtcaatccagtagctttgtccgaccttgttaagaccagtggtttggacagatctcttgttagctccatcatggactaccactgctacgagggctccgcgattgagcctcgccagggcttttatgcgcccacgaagctcacccgtaacatgacggatccatctttcgtccactcctcaaccaccttccacgacatggttggacccggttttggggctcttcaccgtcttctcaagaatgggcctgatcaaactggtcagaagacggccttccaagtcgggcaccacaccaccaacagcttctacgactgggtcgaatcccggccggaggtccacgaggcgttctacggctacatggctggcctgcactccatcatggcgcgttggatcaacgctgtggatttcgataaggactttgcgcgtaatgtcaaggtgaacgaggtggttttcgtcgatgtcggcggtggcgacggtggccagtgtcttgaggtgcagaaagcgcataagctgggcggaaagattattctgcaggaccgtgctgttgtcattgacaaggctaccaaggctaaggaggctgggatcgagtgcatggtgcacgacttcttcactgagcagccagtcaaagacgcccgtgtctattgcattcagttctgtctcctcaactggaacgatgaggactgtgtgcgtattctcgcggctcagactcctgccatgggacctgacagtgtattgctcatttcggactacgtgcaaggactacgatgggagaacgaaggtgggcctctagaggcggatttgttcacaccggccgtagccctctcttcgcacatttgccatggagctaagggaaggtcccgcgcagactaccgtgagcttttggagcgtgctgggttagagctaaaggaagtcaaggcgctgaccagtttcggtcaggcattgatcatcgctaagaaactgtag

SEQ ID NO: 234 - DNA, 8382 bp, Setosphaeria turcica
atgggtagctatccagagaccaacctcctctccatcccagagcccatcgccattgtaggaacctcatgtcggtttccaggtggtgcagactctccatctaaactatggagtctcctcaagaaccctcaagacattgtgcaagagattcctccgagtcgcttcgacacgaaagggttctacaacaaagacagccaacaccacggtagcttgaacgcacgacacgcatatcttttgcaagatgatccccgagcattcgaccgcgacttcttcaacatcagccccaaggaagccgaggccatggatccccaacaacgctgtctcctcgagacagtctatgaaggcgttgaatcggccggatactcgataccccagctgcaaggctccgcgacaggtgtctttgtaggcgccatgagcttcgactaccaatttgttgctatgcgaggcttcgatagcttgccacagtaccacgcaaccggtacttccatgtcgatcctggcgaatcgcctctcctacttctttgactggagagctgttcttgcgctgcggaacggtgatgttagtatggctgttgctgccggcgctaatcttattctcgggcctgagccgtttatcgccctgtcaaacctgacgaaggaattgaagttaaacatgctgtcacccaacggccgttcatacatgtgggattcatccggcgacggctacacacgaggcgaaggcttcgctgccgttattctcaagactcttagtcaagccctagccgacggtgaccacattgaatgtatcatccgtgagactggcgtaaactcggatgggcggactccgggcatcaccatgccgagcgcaacagcgcaggctcggcttatccgagagacataccaaaggtgtgggctagacataaacagtccacttgatcgcccacagtactttgaggcccatggtaccggcacaccggcaggagatcctatcgaggcccgagctatacatgaagctttcttttctcatagtccggaaccccatgacgaccaggcaccactctacgtcggctccatcaagactgttcttggccacactgaaggcactgccggcctcgctggagtccttaaggcatctctggcagttcagaacggttcaattccaggaaatctccattttaaaaacctgaatcccaagatctggcctttctacgacaaactgcgcgtccccaccacattaacgtcatggcctagccttccagacggccagcctcaccgcgtcagcgtcaacagctttggctttggaggaaccaacgcgcacgccattatcgaaagctgggatgagaagcccgagcggtgtcctttgagaactgcagaacatggcggacttgttgtgttatctgccaattccgcacaggcattggcagcaaaggctacgtcgctggctgcataccttcgaaagcaccctgatacagatatcgaccggctctcacgcaccatgttccagcgcgctgatttcctataccgagccgcctttgcagccacgtcgactgcccaacttgcagagaaacttgaagcacgaactgagatgttgaaaaagacttcccgcattgcggcaattcctaaccacttgccgccccgcatccttggtgtctttaccgggcaaggcgcgcagtgggctactatgggcagggaactgtacgatgcatcgcctgtgttccgcaaatccatggaccggctgcagcgaagccttgacacgcttcctcatggcgaacgcccagactggactcttatcgacgagctttcgctgtccaaagagacgtctcgtattggtcaagccgccatctcgcagccactgtgtactgctttgcagatcgctctcatcgatgtcttgcacgtcatcggcatctcctttgctgccgttgttggccactcttctggagagattgcctgtgcctatgcagcagggtacctagatgcacaggacgccatccgcgttgcttattaccggggattccactcacacctctccaagggccccgacgagaaacgcggcaaaatgatggctgtgggactgagtctcgagcaagcgtcagccttctgtagtgagttcgggtctgcgctcaaagtggctgctagcaactctcccaccagttgcacactggccggcgatgcggacgccattgatgaagccaaagagcggctagagcaggaaaagacttttgctcgtgtgctagctgtagacaccgcataccattctcatcacatgcttccctgcgccgaaccctatctacagtcgctacgcaactgtggagtccgagctctcaggggtccaaagcgatgtgcttggtactccagtgtctggggccccaatggacgcagccgctctttcgatagcaaagatagcatggagttgctcgaaggccagtactgggtcgataacctaaccaacacggtccagttctcgcaagcagtataccgagctatttccgaagagcccttcatcatggacctcgcactggaagttggaccccaccctgctctcaagggacccagctctgaagtcatgaagtcgctgactggggtttccgttccatatagcggtattttgaaacgcggagagaatgccgtcgaagcgtttgccgatgctctaggactcatctggacgtctttcccatctcagaaccctatcgtcacgttcgatgggatgcatcgcgccttgccacaagctggaccaaagaagcctagcatcctgaagaacttgccaggttacccatgggaccatgatagcctcatctggcgtgaatcgagggcttctcgcgtgttccgctctcagaaccagccaagacacgagctcctcggtcaccctgtaacgttgggcgaacatagcaggcgagaggtacactggcgccagatcttcaagctgggcgagcttccttgggtgactggtcataatatccaaggcgaagtacttttcccagccacggggtacctcacaatggcgtacgaagccgctatacgccttgtagacaatgagacagcgctgcgcctcgtcgagttgcacgatgtggagattgttcgcgctatgggtttgccagaagattcccccggcctcgaggttctcttcactgtgtccgttacaggccagtctgacgactgcgtcacggcaaaagtggcttgctacagcggcaacgtcaacgtagccaagctggatagtcctcttcatggactcacagctcatttctcagctggcgttagactttggctcggtgaacccagcaatagttccctacctggccgcaacagacccctgctccccatgaataccctcgatatggagcagttctactcctacctgtcgaaggtaggatacaactacgcgctgcctttcagagcaaccagtgtggaccgccatctcaaccacgcggtcgtgacgcttccatcgcctccagagacgtcttcgtctattcgtgatgttacgcatcccgtagtcctcgacactgcgattcaaggagtcttggccgcattttctttccctgaagacggccgcctggacactgtgtatctccccacacgcatcgactgcgtccgcatcaacacatcgtcaacatataatagccccttgatggcagacagcgtcttgacatcgaccgaagcaaaggcactcaagggcgacatcgaggtgttcagcgagagcgacgcagccgtccacgtgcaaatgcgtggcgtccactacactgcgctgaaccaaaacaaagaccgatggctgtacgcaagcgagaactgggtgcgcgatgcaatccacggtattgagccgagccagatgaccaagctttctcctgaagccgaggcgtttgagaagctcctgacacgcatagcgtatttctatctgcgcaagctccgcgatcagatcaagccgtcggagctattgctcatgagcaagcaccgacgccacatgatgaagtgggtcagagagcatctgtttccccagatcgaggcaggccagcgtccagatgtcgaagtggaatgggtaaacgacaccctggaggatgtcgagcggtggagcgctagttaccttgcagctggcaacaacgacatgcaactgcttcatgccgtcgggaagaatctgcctgctattgcccgcggaacgaagcctgcgctacaggtgttgctgaccgacgacatgctggaccgtctgtacgtcgaaggcactggaatcgcggatgctaacctcgactttgccctgttggtgcagcagattgcacaccgctacccgcgcatgaatgtcatcgaggtgggtgccggaacaggcggtaccacgcgagcggtgctgtcctctttgggcgatcagtatgcgtcgtacacttataccgacatctcagccggatttttcgagcctgcaaaggcaaaattcagccagcacggcggaaagctcaagttcaaaacactcaacattgaaaaggaccccatgggccaaggctttgatgaaggctcgtttgacatggttattgcttcaaattgtctccacgctactcgcagtctccaggaaacactgcgccactgccgccgcttgctccggcccggaggctacttagtcctgctggaaatcactcgcgaccatctccctattgaggagtgggacgcgttgctcaaggcaaacaggttctctggagtaactgcaagctcgacgccttcttattgctctgtgataatgtcgcaggcagttgatgataccttccagctactccaggggccgctctctgtcacttctcagcagcagccgttggcatccagaggaccggtattggttgttggtggtaacaagtcaggacttggtgccaggtctcaggaaatacttgcttctcacggtgcatcatacctgcatgagcttgagggcatcgaggtgccgagtggagcagtcgttctctgtctatctgacttggacaaccccatctttagtgtcatgacagaggctgcgttccagggtatacaaacaatcttccggaacgcaagcattgttctgtgggtgacgtctggagcggcttcgggcaaaaatccaatggcgaacgtaacggtcggattaggacgaacactgcttgccgaatgcagtgacttgagactccagttccttgacgcggaagagcctgattcactcactccggaattgctggcgactcttctccttcgacttggcgcaacggaccagtccaactccgatgatatcctctggaatcatgagcctcatcttgcactgagagacggcgcgttctacgtacccagagtgctgcgcctagacagcttgaaccgccgcgctagtgcgaagaaccgaaagctcacccagagtaccagtcttgagctctctgatactggcgtcgagatgtctcaacaagacggagccttggagctgttcgattaccctgtcggcgattgtaggccaagcgagattcgtgtacaggtcatggcatcatccatccatgcttttacactcgatcgcccggcgcccgtttacttctggattggtcacgatgtccattctaaagacagagtcatgggcttttcggaattcaaccgctccataatcacggctacggaagatcagatcttttaccgtggagacaatgtcagcacacaagacaagcgggattcagatgctgagcagctgcaccgattcatcgtacaagcgatggctgcatctcttctcggtaattttgaggcacccatctgggtacacggcgctccaaaccacttcaagccggccattactcgtgctgcccacgaagccaatgtctcagtgtccctgacgacatcagatattgcaagcgctcaagacgagggtttcatccacccgtacatcagcaagcgagatcttcagtcacttgtcccaagatgcgtcaaaacactgatcaacctggaggccgcgcaaaacgaggatctctcgaagctaatgcgagattccctgccttcttctaccaaggtaatccagggtgatgatctgacgattccgatcaggtgcgagaagctgcgcgagctagcccaggttattggtcatgacgaaatcaagggcgcaagtcacgcagaccatgtcacatccattggagagctgacagaagacaaagtcaaagcattgagccaaggggctgtcatagactggcgcactaccgatagcgtcaccacgactgttcgacctctggatcaaagcgggctcttcgatgccaacaagacctacatccttttcggcatgacaggggacgtcggcatatctgttgctgcatggatggttgaccacggcgctcgaaacgtagtgctgggtagccgaaaccctagggtaccagagggcgtcattgaatacatggctcgaaaaggagccaacctgtgcgcagtcaaggtcgacgtgaccaagaaggaagagctgcgagaagcgtgtgccaacatcaaggcaaccatgccgccgattgcgggtgtcatcaatggcgccatggttctccgagaccgtcttttcgcccacatgtcctgggacgactttgaagctgtcctggcgccaaaggtcgctggaactcagaacctggacgagattttcagcaacgaacaagatgcgctggatttcttcattgttctttcgtcggcaacatcgctggtaggcatcataggccagtctgcctacagcgcagcgaaccattttatgtcgagtctggtgcgccagcgacatgctcgtggtctagctggttccgttgtggcaatcgggttcctgacgggcttgggctacattttccgctcggaaaaggagcatctcgatgctattgagagacaagccgagacagacctgcacgacatgctcgcggaggcggttgtgtgcggtcgacccaactctggtcagccgtctgagctcatcaccgccatcaagacaacattcccggatgcgtggcacgaagacccacgcctctcatgctaccttgtacaggatagcgtggaagaaggcactgatgccaaagaagtcgagggcaatgccaaggtcgaagctcaattggcatcggccgaggatccaaagcagtgcttgacgattctgataaagtgcttcagcgtggcgctgggcaacatgctccagctcgacccggctcagatagcagtcgacgtccctgttgtcgatcacggcgttgactctctggtctcggtccgtatccgcgaatggttcctcaaagagctcggcgtcgacgtgccggtactaaagctcatgtcgaccaaccactccctgtcgcgcgtatgcgaggatgcactagcaggatggcggaagcttcgtgcagggcccccaacagcgtcccagacagaggccaaggacaacgagcctcgccgcgacccagaaaaggactggaaaaaggaggtggccgagctcattagcggaatccgaggcctcatcccgcgaggcactgatgcaatggcgagcaccgagccgcctcggacaaacgctcgccgggtcgttgttacaggatgtacagggttcctgggcactcacctgctgcgccatctggtcgccgatgcgagtgtcgctgaggtacattgtctgtgtatccgctcacgccatgtacgcgtccaggacgccaaaatccgtgaatacgccggcgacctagccaagccgctgttgggactctctgctaccgacttcaagcgcctcagtcagacagcagacgtgatcatccacctgggtgccgatgtcaaccatctcaagtcgtacgaggcgatgcgtgctgccaatgtggtctcgacacagacactgcttgccatggcgatgccgcgcagcgtccccgtgcactacatctcatcctcgtcggtggccatgctgcagaagggaacttcggaactcgcagaagtggcgccctcgagcatctcaccgccacgtgacgtcgattcgttgatgaagagcgccgtgggttacgccgccagcaaatgggtgggtgggatgctgcttgaaaacgtcgagggccctccaacggtggtgcatcgctttcccaacatcatgggccatgatgcccctgaagagattcccttggtagctctcgatcgctactgcaccaagatgcgggccgtaccagcgctggatccccgcttgtggatcggccagctcgatgtcatcgatgttggccaggttgtcccggactttgtggaaatggcgtggagcctggattcccgtgaatcattcgccgtacacaactactgcagcaataacagttacttgctttcggatcttgcgggaatgtacagagagagactcggggccaatgttgaggttctgccgacgcctgagtggatgcgcagggccatcgcgatgggtatgcccaagggtgttgaagccacatttgtgggccatgacgaagtgtttgtgtcgcctgttttgcgcaagggtccggccaagaaatag

SEQ ID NO: 235 - DNA, 915 bp, Setosphaeria turcica
atggcggagaacagaaaagaattcgagttcaagactattgatggcctgactctacgtggatgcatgtttctcggtcccaagggcggtcctgctatcattgtcaacggtgccttcaactgccccaaggaaatattcgcacttgatgttgcagaatggtttggaaagcatggcgtaacggctctggcctatgacgctcgtactctaggtctgagcgatggcatgcctcgaaacgatctcgacccacagaagatggcagaagacaaccatgatgctgtcacgttcctacaaaacgagggctgggtcgacccaacccgcatcgccgtatggggattcttctacagctccggcatagctctcgaagccgccgcattcgacaagcgcattgccgccgtcatcgcccaaggcctaatgccaaactggtgtctcaaccccgccgaccaagaagccattgtcgctctcgcaatcgcggatcgcgcaaaccagcttcggggcagcgcccctgactacattccattgttgaaccagaacggcgagcacctcctcatgttcaagtacctggttgatctcaccgatgagcagaaagcacatctccccgcgtgggtccacaacgcgaagaaactggcgccaaacttcaaggaccgcatgacggtccagagcttctatcgccatgcaaagtggaagccaatgcacatttttgaatctgttagtcctactccggtcatgattttgacccccgagaaggatgagattgtggcgccggagctgcagcggaagatctttgaaagtatgaattcgaagctgaagaggcatgagattgtcaaggggaaagggcatgcagactttttggctaatgttagtcttgataaggtgttgggagggcagttggagttcttgaaggaggtttttgttttttaa

SEQ ID NO: 236 - DNA, 909 bp, Coniothyrium sporulosum
atgggcttgagtgaacaggatgttgaattcaaaaccttggatggaactgttcttagaggtacactatatcctacaagtaatagaggtcccgccatagttatgtcgccaggattcaattgcgtcaaggaaatgcttggcctgcctgatgctgcagctcgttttcaatcggcaggctacaccgtgcttctttacgatccaagaaccacgggtctttcaggcggcgagcctagaaatgacatcgacccaatcgcgcaggtcggcgactactctgacgccatcagctacatcagcacgctttcctctgtgaatccttcagaggtctttatatggggcatgtccttctcggcggcggtgggcctttgtgttgccgcccttgacccaagagccaagggtatcatcgcagtgtgcccattgacagacttcacatacacggaggaaaagcttcccatggtgctgaaaaagtgcgcccaggacagagctagccaggtcgccggaaacgatccattttatttgcccatgctggacgctcagggcagaaaccctgcgggctttggcgtcggcgtggatagcgagcaatactcgaagattgtcgaggctggaaaagagatcgcccccagacatgtgaacagaacgactgtgcagacctactatagaatggttttgtggcagccattcggtttgtggaggatgatcaaaaatcttccagtgttattcgttgtgccagagctggacagattgagccctgcagaaagacaattgggtcattgggactccttagtctgcccaaaaagaaaggtcttggtgccaggcgtgggacatatggagataatggaaggcgaccacgtggatgagataatgactgacatggagaaattcctgagagatgtcttggagggttcagtaccatag

SEQ ID NO: 237 - DNA, 1584 bp, Coniothyrium sporulosum
atgttggccaagcagatcctttccaacttgcacttgagtgaagcgttgtattcagtggtgctagtgctgctagccggtacctgcgtcttgtatacggcggttctagcgatctacagattgtactttagcccactggctccttttcctggacctaagttggcagctgtcaccgcgtggtacgagacatactttgagttggtgaagaatggaggtggtcatttcacattcgagatcatgagaatgcatgagaagtacggacccatcgtgagaatcagcccaaaagagcttcatattgccgacagtgaattctatgatacgatttacacatcaacgcaaggcttcgacaaatctgcacacgttcaggatagattcggagcgccagaggccgcgttttcaactcctgatcatgaagtccacaagagacgtcgtgctgctatctccccattctttgctaaaagacgtatccatgagcaagcgcccatgatccaaggccacgtcaacaagatcgtcagaagacttcatcacgaatatgctggaaaaggaaagattttgaatttgaatgacctttattcgagctatgtgtcagatgtaataatgagctacgcattcaatcgttcgtacggttttttggacgagccagactttgtctcgtctttcacatcatccattcaaggattgaaagacttcgtacattacgcgcagcagcttccctggttgccaaagatcattgacagattgcctgacagacttgtcggctacatccaacccagcatgaaagccatcctacacttccaaaactcgatgaggaatcaggtgaaggaggtgagagaaaacttgcactctgacaaggccgaagcccaggaaggtaccatcttcttcagcatcatcagatccgaactaccacccgaagatttgacgatcccccgtttgaaggatgaggcgatgagcgttgtcggcgccggcatcgagacgaccaagatggctttggcagttctgtgctttcacatcatcaacacccccagcgtgttggaacgtctgcagaatgagctacaagatgccattcccgatccatcaaaccccccaccactgtctgttttggagaaactgccatatctatatgcgtgtctgcaggagggcattcgtctgtcttacggtgcgatagcacgttcgcaaagaatttcaaggcacaaccccatcaagtacaacgattgggttatcccacctggtgttatggtgtcgctagatacataccacatgcaccacgacgaggccgtcttcccacaaagtcacgaatacaggccagagagatggcttggtaatcccagaggccccgacggcgagaaggctcttacaaagtatttgactgcgtttggaagaggtacaaggatgtgtgtgggattcaacctggcctatgctgagatgacgcttgtacttgcggcactgttcagaagcttcacctttgagttgtttgagacggacaaaggtgacgtggagatttttagggatatgataggcttggaggttaagccaggtagtaagggtgtcagggtcaaagtgagtggtaaaggtgaagttcagccttaa

SEQ ID NO: 238 - DNA, 7152 bp, Coniothyrium sporulosum
atggcggtacacgactcttctttgggtgttttcagacacgagccactggctgtcgtaggttttgcttgcagacttcctggtaaaagcaacaacccaaccgccctatggaagttcctggagagaggtggcatcgcagatatcgagccccctctatcgaggttcaatttgaaaggtcacgaggatggctcaaaaagaccaaaaactatgagatcacccggcggtatgttcatcgaggacatccatcccacagaccttgatgctcagttctttggtctgtccaaggcggaagccatcgcaatggatccacagcaaagacaactgttggaggtcgtgtacgagggtctggaaaattccggcatcacgttggagatgctgaagggtacatcggcaggatgcttcgttggttcttttgcttgcgactatggagatatccagtcgagagatcctgaagaccgtgcacctaacaccactgttggcatcggtagagccatgttgagcaatagattgagtcattttcttgacatcaagggcccaagcatgacgatagataccgcttgctcgggtagcctgcagagtcttgatgtagcgtcaagatacctgcagacgagagagatcagcaccgccattgttgcgggtgcgaacctgtatctaagcccagagcattgcatcgatcttagtggtctgagtggtgctgcgtccttaacaggaagatgtcatacattcgatgccaaagccgacggctacgtgaaggcagaggcggtcaatgtgctgattgtcaaacgtttggctgatgcattgttgagcaaagaccccatcagagccatcatacgtggcactgcttcgaacagtgatggctggactgctggaattgctagtcccagctcaaaagcccaggccgaggtcacaagacaagcctacgtcaacgcaggtatcaccgagtataatgcaacctcttatctagagtgccatggaacaggtacaaagacgggtgatcccgttgaggttaaaggtgttgcttccatcttttgtgctgatggtacgaggaaggatcctctatacattggatcgataaaaagcaacataggacactctgagccagcgtccggcatatccggtgtcatcaagacgatcctgtctatggagaaaggtgtagtacctggcaaccccacgtttgaaaccccaaacccagacattgactttgagaagttgagagtgtccgtttcgagaaaatctagaccatggcccaaagtccccttcaaaagagccagcgtgaactcgtttggtttcggcggctcgaatgcgcacgtcatcttggacgaggcaaagacgggcgccgctggttcccaaatgagattcaagtcgtcctttggccatgtagacgactttgacttttttgcagaagagaaactggagccaccacaagtcctggtgttctctgccaacgacgtcgcctcgttgcagagctacgccgattctctaaacaagcatttgttgaaccctgcagtcagcgtggagttgaccgacctggcgcatacgttatccgagagaaggacgaagcatttcaatagagcatatctaattgcaagaaacgcccagatcgacgtgcacagcctgaagttgggaaagccaagatcttctcaacctagaatcggattgatctttacaggccaaggtgcacaatggccacaaatgggtaaatcgttcttggaaacgattccagcctgcagggccgtggtggaaaggttggaccgtgtgttgcagacgctgaagaacccaccaacctggaccttggtcgacgagctgacgcagccaagaacaaaacagcatttgcagcagcccgagtactcccagcctttggtcacagctctacaactagcgatcttggaagtcctgagatcatggggcgtacagcctgtaagtgctacaggtcattcgtctggcgagattgcagccgcggttgctgctggtttgctgacgtccgaagatgctatcaaggtagcgtacttcagaggaagagcagcagccgacgtgcacgatgcgtccaaagctaaacacggcatgcttgctgtcggattgggcgagcatgacgtgagagacatgttgagagccgaggagctgcccattgccatcgcatgtgtcaattcgccaagcagcgtcacactttctggacaggtggttgccctaacagctttggagcagaggttcaaggagcaaggcaagtttgctagactactacaagtcgatgttgcctaccactcaaaatacgtcgcagacattgccgctaggtactacgagctgatgagacaagagtgcgacttccctttggcagacgcgacatattgcaagatgttctcatccgtgacgggatccgagaacaatcaggcttgcaatgcagaatactggagaagaaacatggagtcgcctgtgctgtttagccaggctgtctctgcggccttgacggaagacgcggctgccgacttcatcatcgaagtcggacccagtggcgccctggccggcccattcaagcagatcaaagcatctttgggcagcggagcggcacatgtgtcgtaccacgcggccagcagaagagatgttgctgctgtcgatgcgatttttgaaatcgctggggaactgttcttggcgggagcacaggtcgatctggccagagtcaaccaataccttccaaaccagcaacccccttccactttgatcgaccttcccaactactcgtggaaccactcggtcagattgtggtacgagagcgaagccagcaaagactggagattcagaagatacccaagccatgatttgctgggaagcaaagtcttgggtacttcgtggcacgcaccttcgtggaagaaagtcctgaaaatcgatgaggtcagctggctgaaagatcactgcatcggcggacaggtgctgttccccgccgccggatatgtggccatggcgatcgaggcgcagttccagacgagccagtctagaggcttcatcgaggaaggtagatctgtccacgaggcaagttacagactgagaaacgtcgcattcaaaaaagccatggtcattgagggctccgagtcgagaatcatgctgacgttgagtccagaagacgacggcgaaaagtcctggagcagattcacaatttcttccttcaccgacgaggagtggaacgagcactgcacaggtttggttgctctgaccgtcggatcccagcaagtcgcttcacaacatgatgtgagagcgttggagtttcccacccctgcagcggcgtggtacaaggctatgagagacgtgggttacaattttggtgagttgttccaaccacagatcagcatcgaggccgttgctggaagcagacaaagcagggcacacatctcgttcaaagagccaaaatcctcgtacccacagtctccatactctgtgcaccccgtctcaatcgacggctgtctacaggcgggtgcgccatcactgtggaaaggtattagaagtgcggtcggcggtgcgcttgtaccagcaatgatagacgacatgtcgatcaattctagaggtcacatcgtcgaggttggcattgcgaccacgtctgccgtcttcacgggtgtaggaagctccgaggaagcacaaaactacagatccaacatcacagtctacgaccacgagacgcatttgccactggtccagatcaagggcttgagataccataaattggacgcccacgatgactctgccgatacgcattccttcatgagagtagcttggaagcccgatattgcctacatggagggagaggctttgcagagatactttagatctggcgatggtaagccaaagtcagtcctagagctattgatccatagagatcccgctgtcgacgttctagaagtcaacatgtcgagtgacatggagagcatgtggatcagcaacaaggcttcattggaagccagcggtgcctgcggacagtatactctagtgactccagacccagcctccttgttcaccttgcagagcgagttcagagaagttcccggtgttagagtcgtgcatgccaatatcaccgacgctgcgttcgatttctcgtcgttgcctacaaattacggtcttgtgatcgtgagagcatcaaatgacgacagcgcggagctgcagaccgccctggtgaacatccaaagcttgcttggtgaagacggctttcttcttgtgcactattcggcctcgttagccttggataccgagactagcaccgacagcggtgcctccggctctcacttccaggtgctaggcccagaacatgaggtcgttgagaagatcctgcaggacgcgggatacagatctattagaaatgtacctcagatcgtgccatcgtcagacgcctatatttccgagctgatcgcgcagcctagcgccagggaggcacttgccaacggtgtttcgcattcagtggacttgctgcgtctttctaatattgcgcatgacatgtcggaaatcgagcactctgtcacagacaacggcttcaccgttagacagttggatgtcgagcacttgggcgagatcaagtccggttccacggtgttgattgtcgacgaagcgtacaaatcagtgttgtgcgacgtggaccagaagcagtggcatgctatacgtacgcttacggagagggactgcaggatcttgtggatcacagctggtgcacagctgcaagtgactaacccccaaggtgcgttgatcaacggcatggctcgtgtcatcagagcggagaacccatcagctgctttgaccatcctggatgtcgaagacgtgtcgaacgcatgtgccagagaagccatcaacaagctgctgtacgatgtcaacaacggttcggtcatggaagcggagtatgtcgagagatctggtgtcatccacaccagcagagtccttttggatggccccgtcaacgtcgcacagagagaggattctcaaggcggcgagttccagaccaagcatttgcacgagcacccttcctgtgtcagaatggtttgcgaacgcccgggcatcttggagtcgctgaactttgtagaagtggcagagggcgacttgcccttggaggatgactttgtcgaaatcgacatgcacgcggcaggcctgaattacaaggacgttgccacgtcccttggcttggtcccagagaaccaatacatgttgggattggaaggcgccggtgtgatcagaagacttggagcgggcaagaaagcgcaaaagtttagaatcggtcaaagagtcgtgctaatcagaagaggcagctttggcaacaaggtccaatgccctgttgagggcgtgcatgctatcccagaatggatgacctttgaagaagccgcgacactgccagtggtttacttggccgtcatctatggtcttttcaacttggccaacatccagaaaggctccactgtactgatccactcagcagctggaggcgtcggcattgctgctatggaggtctgtagatacgtgggtgcagagatcttcgccacggtcggcagtgaagagaagcgtgtgcatctgatggagaagtatggtttgagtaacgatcgtatcttttcgtcgagaaacagcgagttcgcagaggaaatcatgagaataaccaatgacagaggcgtggacattgtgttgaactcactgaccggtgatttgcttgatgcctcctggagaatcattgccgactgcggaaccatggtcgagattggaaaaaaggacatccttgcgagaaaaggattggccatggatcccttcaacagaaacgcatcgttcagggccgtggatatgtcggccgacagcattaccagacccgtcatcgcggctctgctgtcgcagctgttcgagatgctgaatggaagacacgttagacccatcgagcctagaaccgtcttcccctactcgaagattggcgatgccatcagatacatgagaggcggcactcacatgggcaagattatcatatcgagagaggccgagaacagcacgcctttggtgccaatcagacccgcaaagagagtcgtgcatttcagggacgacaggtcgtacttgattgtaggcggattgaagggtttgtgcggcagtctggcggtgtaccttgctaggaatggtgccaagcacatcgccatcatggcaagaagcggctacgaagacgaaagatcgcaagcggtgctgttggatctgcatgcattgggcgcatcaccaacgttgatcacgggtgatgtgtcgaagatggaagacgtgaaaaagtgctttcagagcgcttcgccacctataggaggaatcatccaaggcgcgatggtcttgagagacaagacgtacgaggagatgagagtcgacgagttccacgcggccaccgcgtgcaaggtccaaggcacatggaatttgcacacagctgcacaggacttgaacttggacttgagcttcttcaccatgctgtcgtccatctcgggcttggtcggtcagaaaggtcaagccaactatgccgcagccaacacgttcttggatgccttggccgcctacagacacggccgtggcctgcccgcgtcctcggtcgacctgggcgtcatcgaggacgtgggctacatctcggagagagccgccgtggccgcgagattgaacacggccatctggaagcccatcaacgaggcgctgctgcacagaatcgtcagagcctcgcttctgcagcagtcgtctcgcccgctgcacgtcgccagcgccccacacatggtcacgggtatcccacacccacagcctgttgatgcaccattggtcgcggacccaagattcagaggcctgagacagactgcggcggcaggcacccacgcagcggccggcgacgcgagctccgaagtgagaagcctgttggcgttggctgcgtcgccagccgtggacaagcacgcgctgctggcggcggcggtgggcgtgatcaacggtcatttcatgaagagtctgggtctgggtgagccaatggaacccgcgaagccactgacggtgtatggtctggacagtttggcggcgatggagtttaggaactggctgagaaaggagctgcaagtgagcgtgacgacgctggagattgtgggtgccaagacgctgaatgcgattggtgagaaggtgtgtgagaagctgggtgagggcggcaagcagtaa

SEQ ID NO: 239 - DNA, 999 bp, Coniothyrium sporulosum
atggacacgttgaagagattgtggcctcagttgcggcccagccccagagccccattgaccgaggccaacctgccatcgcaagcgggcagagtcgtgttggtcacgggcgccaccgccggcgtcggatacgagctgtcgagaatcttgtacaacgcgggcgccagagtctacatggccgcgagatcgcccgccaaagccgaccaggccatggccagaatcagaagcgcccaccccgcgcccaaggtgcccggcggcgccctggtcttcttgcacttggactacgccgacctggccaccgtcaagccatgcgcgttggcgttcctgtccaaggagccaagactgcacgtcctgttcaacaatgccggcatggcctccgccccacccgaagcgagatcgagcgccggcttggagctgcacatgcaggtcaactgcgtgggcggctttttgctgaccaagttgttgacgcctgcgttggaggctgctgccaaagacgacgacgcacccccagccgccgtgagagtcgtcttcagcagcagcatgttggtcgacgccaaggcccccgccgacggcgtcccacccgacgagttggacaacccctcgttggacggcgacagaaactacgccatcagcaaggccgccaactggttcttggccgtgcagttcgcccagagattgggtccccagggcgtcgtggtcttgacccagaacccaggcaacctgagaaccgccatcttcgacgaggtgcccaaggccattgtctgggcgagctacccagtgctgttcaagtcgattgacggcgcccacacgtcgctgtggtcgggcttctcgagcgacgtcaccctggcagatagcggcagatacgtcgtgccctggggcaagtggcatccaaaccaccgtccagagcagctgttggccatcaaggacaaaagcgagggcggcaagggctacgcccaacatctatttgagtggtgcgacgcgaagaccaaggcgttccagtag

SEQ ID NO: 240 - DNA, 1716 bp, Coniothyrium sporulosum
atgcaacctgcttcattgttgcttgccctggctgctgccgctgctgcgtcgccaacctacggctcgttccccgtcagaggacagacgtgtagaaagttgccccaggacaaggactggccatcgccacagatctggaacgtcctgaacgcgaccgtgggaggacgtctgattgccacaacacccctagcatctccctgccacgaccccaactatgatgccgcaaagtgtgacgctttgagagcgggctgggtgtacccacagacgcatttcgattcctccacctccattgttgctccatacttccagaatcagagctgcgacccatttacgtctagagcaagcacttgcaaggttggaacgtaccccagctacgccatcaaggtcaccaaggcctcggatgccatagcaggcatgcttttcgcacaattgaacaatgtgcgtctggtcatcaagaacaccggtcacgacttgttgggccgttctactggtaccggaggtctttcgctgtggacgcactacttgaaggacatcaccatcagtgattacaagtcgtcttcttacaccggcaaggctatgaagatgggtgctggtgtccaagcctacgaagcctacgaggccgctcacaagcagagcctgagagttgtgggtggtacttgcccaactgttggtttggccggtggctacacccagggtggtggccactcgatgctttctaccgtccacggtcttggagctgaccaggtcctggaatgggaggttgtcaccgccaacggcagcctgttgaccgccacccccgacaagaacagcgatctgtactgggccctgtccggtggcggcggcggtacctacggccttgtcttgagcatgacggtcaaggcacacgccgacaccaaggtcaccggcgccatgttgaccatcatccaacagggcgccgaggacgccttctggaagggcatcacgttgttccacgcctccatgacctcgtacacggacgccggcgcggcctttggctattacttgggccagggcatcatggccatccaacccgtcaccttcccaggcaagtccaaggccgaggtcgaggcgttgatgttggacctgaccaagaggttggatgccgccggtactgtgtactcgttgaccgtcaccgagttcagcaactactacgacttcttcaacaactactacggcccacttccctacggcgtctacacctcggcccaggtccagggtggacgtctggtcccaagaacagtcgtcgccaccgccgcctccaaccaggccttcaccgacgccttgaaggccatcgtccaggaccaggacttccacgtcgtcggcgtcggcttggacgtcagcaagacagcaaccgcttccaacgccgtgcaccccaagtggagatcgaccgccatcaccatcgtcgtcgccgccaactgggactacacgcagccatttgcgaccaacgccgccaacgaaaccttgatcaccgacaagtacgacccattgttgacggccgtcacgggcgccgacagcggcgcctacgtcaacgagggcgacttccagcagcccgcgttccaggacaactttttcggtgcaaactacgccaagctgagatccatcaagaagaagtacgaccccaacagcttgttctacgcgaccaagctggtgggctcggaagactgggctgtgcaggctgatggcaggctttgcaaggcctga

SEQ ID NO: 241 - DNA, 1011 bp, Pyrenophora teres
atgtcgatgacatcaggcaacaccaaggataagggcggctacagacaaatcaacaagtccctcaacatctgcgcctttgaagattacctcaacggccaaacagcagggttgaagcctatcccagatgtcgaacaagtcacaccaagagtgatgcgtgtacgaggacagaaccccggcaagttcacaatgcaaggcacaaacacgttcctagtcggcactggcgcttctcgcatcctcatcgacacctcaggcggcgagccagaatacgcaaagctactcgcatccactctggaattcctaaacatcagcatcaaatacgtcctcctcacacactggcacggcgaccacacgggcggagtcccagacctactccgcctctacccccacctagaaaaccacatctacaagaacataccagaggtcggccaccgcgacatctcagacggtcaactgttccacgtcgagggcgcaacactcgtggctgtacacacaccgggccacgccgaagatcacatgtgctttgtgctcaaggaagaaaactcaatgttcactggtgacaacatcctcggtacgggtaccagcgcagtcgaggacttgggtatcttcatgtccagtctgcaaaagatgttgggaaagaactgccaaaccggacaccccgcccacggccaaaccatcggtgacctaaacgcaaagatatcaaaggaactcatgtcaaagttccgacgagagaagcaggtactgcaggccatgcgcgacctacgggatgctgatgagaggcggccaaacgttcgaatgattgtcgatcgcatgtatggaagctccgtcaacgagactacgcggacattggccttggagccgtttattggcgaggtactgcggaaacttgctggtgatggcaaggttgggtttggcgtgcgggctgggaggaagggctggttcctggttccaaatgagcagcagagtacgcagttacggcatacacattcggtttttgtaagagctagtgcatag

SEQ ID NO: 242 - DNA, 5358 bp, Pyrenophora teres
atgaacgccatctatttcagcaacgaattccccaaggaggatttgaaggatgtcttccgacagctgcacaaggagagcaagagcagcatccaccatctgctcgcacgctttatgagtgaggccacgagggctgtgaagaaggagattgagcagctaccgtccagcctgaagcagataatacctccttttgagactctcagtgcttgggcggagcagaaggaactccgcgaaggtgaactgtgtggcgctatcgatggcgttttactagttctacttcagatatcagtatacatatgccatgctgaggccggtgcagagctcccaactgctccgcacctatctgcgcttggaattggtctcctcggagccgccgctgtttccatgtccaagcagatctctgacctgccctcctacggtgctcaagctatcgctattgctttccggttgggtgttcacgttcagggtgtgtctcaccagcttgaggcccgcgagctcgacgagactcccaagacttgggcttatgttgttcacaacatcgaccccaaggatgctcaggctgagctggaggcattccacgaggcgaacttgacatcaaacactgcccgcatatttatcagcgccgttagccgtacctccgttacgatcagtggcccgccctcgaagctcgagagcctcttcaagaagtccaaggttttccgggatgcacgatcaatcgccctgcccgtctatggcggcctttgccatgctcctagtgtctacagcacaaaggacacacaagccatcatcgacggcttgaacacgccgacatctgcagctttgtccagccaagctccccaagcaccgctgtactctacgagcaccggaaagccatatgaggcagtcaacgccatcgggctgttctcatgcgtcgtgaccgaactattgaccaaagccatcgagtgggatcaagtcattgccggtctagtcagtgctgctaagtcggctgaagcaactgaggttacgctctcctgcttcggcaactcgattccactgaacgacctcaagacagcgcttcaagctgccatcgccgatgtcaagatcaccattcacagcttcatgaccgttctcaagaagaacgcaactggcggtgctcctccccgcggtacagcccagtcgaagcttgccattgttggaatgtcatgcaggcttcctggtggcgccaccgacactgagaagttctgggagcttcttgaagccggtctcgatgtctctcgcaagattccggcttctcgctttgacattgaaacccattacgatccagagggtaaggacttgaacaagaccatgactcaatacggttgctttatcgatgagcccggcatgttcgatcccagcttcttcaacatgtctccccgtgaagccatggctgttgatccccagatgcgcctgtctctcgtcactgcctatgaagctttggagaaagctggctttgttggcaaccgcactctttccaccaagctccagcgcatcggaacattctacggacaggcagctgacgattaccgtgaggtgaaccagggtcaagaggttggcacttactacatccctggtggatgccgtgccttcggacctggtcgcatcaactacttcttcaagtttgccggacctagctacagcgttgatactgcttgctcttctgggcttgcagctatcgaggttgcttgccaggctctgtggaacggcgaggttgacatggctgtcgctggtggtgtcaacatcctaacaaaccccgatggtttcgctggtctctgcaggggtcacttcctcaccaagggccagaacgcttgcaagacttgggatgccaccgctgatggctactgccgtgctgagggtgtgggatctattgtcatcaagaggctcgaagacgcagaggcggacaacgacaacattcttggtgtcgtcctcgctgccggaaccaaccactctgccgaagctgtctccattactcacccacacgctggacaccaatcttatctgtcccgtcagatcctccgacaggcaggtgttgatcctttggatgtctcctacattgagcttcacggcactggcacccaggcaggcgatttcgaggagctgaagggtgttctggacgtctatgcaccaaacacctcccctagtcgtcgcactgaccaggttctccacattggaagctccaagtccaacgttggccacggcgagtcggtcgcaggtacgaccgcactgatcaaggttcttttgatgcttcagaagaacgccatcccccgccacattggtatcaagactgagatcaacccgcgtcttcccactgatcttgatcagaggaacgtcgtcattcccttttccaacaccccatgggctcctggaaagcgcattgccgctgtcaacaactttggagcagctggtggcaacaccatgatgatcttggaagaggcccctgcccgcgaagcacgtcaagagaaagacccccgtcagactcatgttgtgaccctctcagccaagaccaaggcctcgctccgtggcaacatcgaacgcctcctcgctcatctcgagagggacgagaccgtggcattggaggatcttgcctacaccaccactgcacgcaagtaccaccactcataccggatagccatctccgcttccgatattggttccgtcaagaagcagcttacttcgcagctgaacaagattgatgctttgaagcctgtcaacaagaccaaccccccgtctgtggctttcgccttcaccggtcagggcgcatcttaccagtcgatgaacctcgagctctaccgcgatgtccccgtcttccgagagcacatccgcacccttgacaagctggctcaggctcaaggcttcccgtccttcattcccgctatcgacggctcgcaccccaaggaatatgttcatgctcctgtaatcacccagctagcactcgtctgtgtcgagattgcgctcgcgcactactgggcttccctcggcatcaagcctgacgttgttgttggccactctctcggcgagtacgcagctatgcacgtcgctggtgtcatcagcgccaacgacgccatcttcatggtcggttccagggccctgatgctcatggagaagtgccagtcaggcagccactgcatgatggctgtacgcgcctctctggaaaacatcatcgccaactcaggcggcaagccccacactgtggcctgcatcaacggcccagctgatactgtcttgagcggcacaaaggcccagatggacgacatcgccaaggacctcgaggctgctggactccgatgcatcaagcttgatgttgcctttgccttccactccgagcagactgaccccattctcgacgaatttgaggccatcagcaagagcggtgtcgtgttccatgagcccaagctgcccatcatctcgccccttctcggcaaggtcatcttcgatggccacactttgaacgccaactatgtgcgcaccgccacccgcgaggctgtcgactttgtctctgccatgaggaacgcttccagcatttccaccatcagcgacgacaccgtctggattgagattggtccccaccccgtctgcgttggattcatcaagaccaccctgccttctacccgccttgcagttccttctctgcgccgtggagacagcaactggaagaccatgtcggatagtgttgcagctcttcaccttgctggtgtcaatgtcgactggaacgagctccaccgtcctttctctggccaggtccgccttcttgagcttccgacctatgcttgggacgagaagaactactggatgcagtacaacggtgactggtgcctgaccaagggcaacactttctacgagaagaagcagaagaccatcgagcccgccatcggcaacaccaagcagtaccagtcattgggctctttggttcagaacattatctcagttaatgtcgagggcgaggcgggtagtgtggtcatgcagtccgacctcatgcagaaggagttcttggaggcagcttcaggacatcgtatgaacgacaatgctgtcgtcacatcgtctattcatgcggatatcgcttacaccctgggtgactacctctaccgcaagttttaccccaaggccaagcgcccggatatggacatggccaaccttgaggtcaccaaggctctcattgctaagaagaaaggcatggatacacctcagtctatccaagtcactgccagcaccaccaatatccgatctggtgtcctggacctgacttggcagaacgtagaatctgatggcagctgcgctgagccttttgctacagcccagatcatctatggcgatgctaagcagtggctctcatcctggagccccatgtcccatcttatccaaagccgcatcgagtcacttgagcgtctagctgtcgagggacaagctaaccgtctatcccgcaacttggcctacactctattctcctccaacctagtcgactatgccgacaagtaccgcggcatgcaatccgtcgtcatgaacgacctagaagcctttgccgaagttaagcttaccgagaagcccgacagcggcacctacgccgtgccaccctactacatcgacagtgtagcgcatttggcgggattcatcatgaactgctccgactctattgacaccaagaacaactattgcgttacttctggctggaagtctatgcgcttcgccgagcccatgactccgggagctagataccgatcttatgtcaagatgattcctaccaaggaggacccagctgtcttccttggtgatgtttacattctcaaggcagaagacaactctattgttggaatggttggtggcatccacttccgccgcttccctcgtatcctgctcaaccgcttcttcagcgcccccgagcctgctaaagcgtcgtccggtcagcaagccaagccagcacccgcaaaggccgcgcctgcacccaagcccgtcgcacaaaagaccatcgctgctgcccccaaggcacaggactttgacgctcaatctagcagcagctcggaggtgactcctcctggcaccccgctgcttgctgcctcggccaacacttcttccactagcatcaacgtcattgctgccgagccagcgaagaagggcggcaacggtatcatggacaaagcgcttgacatcatcgccaacgagacagctattgacctggccgacctggaagatgacgccgactttgccaatcttggtattgatagtttgatgtcgcttgtgctagtagagaagttccagaaggagcttgatgtcaaggttaacggcagtttgtttttggattatcctaccattggcgatttgcgcgagtggttggagaagtactatggttag

SEQ ID NO: 243 - DNA, 924 bp, Pyrenophora teres
atggagagcccttttgtgatgccgcaggaggatgtggaggcgctgggtcagtcaaaggcgttttgcgcgctgaggaggtgtcttgctggtgaggccgcgttttgcgcaacacacgcgcattgcacaccccaagccaaacaaacatggctccttcaccgcgacattctccacgccctcatcatgcctgtagtgacgctcttttcgcgcgcctcaactctggcgtcggccgccctctgtacgcagcgaacgtcggacctcgaacttgcgttttcgggtgaatcgcgcagcgctttcataggcctgcaatgcttcatcagtgaggaggctgactggtgccgcacgagagggtgtccggcttgcgtcgtctcggccacgttgagcaccgacagccatatccgcctgacaattgctgcgagcctgctcagcactgcgagtgtagccacgcccacgcaagaggaacctcgacacgacagtgataggacgctgcctccactcccgcatatccttcctgccctgcaacacgccgtgataaacgacccgttctgggaaggctcggacatctggggctacatcttgtcgcgtgccacccaactgtcggctggcatacaagccctaatcgccgagtgtgtgaatcttgaatcgctcgtctcatcgcccacaacagacaggccgggtgcgaagcgcggcttgacgcatccctcggtgccttttggagcttctggccaggccgtcgaggaaaagggcgtcaaactcagaaagagcaagctagcaaagcggcagttgaggctacgagacgaggaggttgagctgatgaggagagtagccatgcaatgctgggccaaagcccaggtaccaaagaaaatcagaggcgatgtcttgggcataagcgatggcaagaggacgaggagcttgacttgcccatga

SEQ ID NO: 244 - DNA, 789 bp, Pyrenophora teres
atggataacacgaccctcttcgacgtcaagaacaaaattgtcctcgtgaccggcggcgccaaaggcatcggccgcatgataagcgaaggtttcatccaaaacggcgcaaacgtctacatctcgtcccgcgacgcgaaagcgtgcgagcaagcatgtaaagagctgaatgcactgggaaaaggcaaagcagagtttatcgttgcggatttgtatcgggaggatgcggcgagttttgttgcgggggagttgcagaagagagtgggaaaactcgacgtcctagtgaacaacagtgggagtaactggggcgagtcatacgacacatacccatcgtccgcctgggaccgcgttctaaccctaaacctaaaacgcgttttccaactcactcaagccgttacaccccttctctctgctgccgcctccccctcgtcccccgcacgcatcatcaacattggcagcatagacggtctccgtgtcccagctctcgaaacgtttgcctattcagcctctaaagcgggtctgcatcacatgagcaaagtactagcgaaccatttgggaaagaggaatatcacggtgaataccgtggcgtgtgggccgtttgagagtaagatgatgaaggcgacgctggagaagcataggggcgttattgaggaggggattccgctggggaggattggagggaaggaggatgtagcgggtacgtgtatttggttggcgagtcgcgctggggcgtgggttaatgggattgtggtggcattggatggggggagtgttattggagctaagctttga

SEQ ID NO: 245 - DNA, 1722 bp, Cladophialophora yegresii
atgggtgtcgaggaaccaacaaataacaccatgcaagagcggcagatccaacaccaacaggtgtctccaaagtcatctgatgagagtccgacggtcgaaaaccaacccggtatagccatcgactcagctttcgaaggccgggaatggccaggcccagcacaggttgctgctgtcatgatcgccatctgcctctctgtctttcttgtcgctttggaccgcaccatcatcgccaccgccattcccaaaatcacggaccagtttcattcactcgacgatgtcggctggtacggtagtggcttcttgctcacgtcgtgcgccctcctgctccctgtcggccgtctcatgacattctactctcccaaatgggtgtttctgaccatcctggtcatctttgaaattggatctgtcgtctgtggcgtcgcaccgaactccgatgcatttatcatcggccgggccatcgctggtattggcggcgcaggtatcatgaccggcggcaccgtgctgttgacctatactatacctctggccaaaagacccaagttccaggggttcattggcatcagtttcggtcttgccagcgtcgctggtcccttgcttggaggagctttcaccagcaatgtcacgtggcgatggtgcttctacatcaacctcccagtcggcgccgtcagcatcatcttcatcacctttatcctcaagtccacaccgcctccgggcaagaaagatgtgtcgttcctgcagcatttcttccaacttgaccctctgggcacgttgttcctgatcccgtcactcgtctgcctggtacttgccctgcaatacggtggtaccatcgatccctggtcgagtggtcgggtaattgctctgcttgtcgtcttcgccgttcttgctttggggtttattctggttcagatattcaacaagaagaacagcatggttccccacggcgtcatcaagaaccgcgacatcctttccggtgctctctacatgttctgccacggcggcgcgctgacgactctggtcatctacgtccccctgtacttccaagccatcaaaggcgtcagcgcggtgaagtctggcgtggataccttcccaatgatcctggctctggtcctgggcatcatcatgggtggtgtgctgactggcaaaatcggctactacgcacccatgggctacgtctgcgtggtcttggcgccaatcgggtgcggattgatcgcgacctggacacgaaccaccaatcatagcatgtggatcggataccaggtcatcgccggctacggtctgggcattgggttccagtcgcctatgacagcggctcagacggtcctagccgactctcttgtcccgctgggcgtcgcttgcatccaatttgctcaggtcatgggtgcgacagtctttgttgctgtcgcccagaatcttcttaccactcgcctaacttccggcttggcgaaaattctccccgacttcgatcccaacgtcctagcaaacactggtgccgttgagttgagaagcttggttccggccgcccagttggatcaggtactggaaatctacatgcacgccctccgacaagtcttcttcttgtgtgctgggttggcggctgccatcatcctcggtgccgcaggcctgtcatggaagagcgtgaaggtggagaaacaggagccgaagaagcgagaagagggctcagagaagagcaaggatgaggaggctcattcgggtgaagaatag

SEQ ID NO: 246 - DNA, 492 bp, Cladophialophora yegresii
atgggctcgttaggttacaagtccgcttccgctgaagaagtcatagcctgtcaggccgccatcttcgaatgggccgagagcttcgacaccaaagactggaacaaactcgcagaaatcgttgcccccactctatatgtcgactaccgtgctgtaatgggcatgctgtgggaatcaatgcccgccgcccagttcatcgacatggcgtcaaatgcgaaatttctgggcaacccacgcatcaagacgcagcatttcatcggcgcgggcaggtggatcaagaccggcgaggatgagatcacgggatatcaccagatgcgggtggctcatcagaagtacaaggacgatgaactgtccgaggtactgtacaaggggcatgctcatggcaaagcgaccgtgcagtatcgcaggatcggtggcgtgtggaagtttgctggtctggagcctaatatccgttgggcggagcacgattatgacaagatattccatgaagattag

SEQ ID NO: 247 - DNA, 795 bp, Cladophialophora yegresii
atgaccactccatacatccccggccgtctcgatggcaaagtcgccgtcgtcaccggttctggacgaggcatcggcgccgctgtcgcggtgcatctcggccgcctcggcgccaaagttgtcgtcaactacgccaactcagccgaacacgccgagaaggtcgtcgccgagatcaaaaacctaggctccgacgcgatcgccctgaaagccgacatccggcaagtgagccagacggcgaaactcttcgacgacgccaaagcccacttcggccacatccacatcgcggtcagtaactcgggagtcgtcagtttcggccacctccaagacgtcacggaggaggaattcgaccgggtgttcagcctcaatacgcgcgggcaattcttcgtggcgcgcgaggcttatcgcacgctcgaagaaggtgggcgcatcatcctcacgtcgtccaacacttccaaggacttcagcgtgccggcacattcgctgtactccggctccaagggggccgtggattcctttgtccgcatcttctccaaggactgcgggccgcggaagattaccgtcaatgccgtcgcgcccggcgggactgtgactgatatgttccatgccgtgtcgcagcattatatccctggtggggagaagttcacgccggaggagaggcagcagatggctgcgcatgcgtcgccacttcaccggaatgggtaccccgaggatgtagctcgcgttgttggattccttgcgagcaaagaggccgagtggattaatgggaaggtgcttacgctggatggtggagcggcatga

SEQ ID NO: 248 - DNA, 1920 bp, Cladophialophora yegresii
atggcaaaagaaacacccagtctcagcaggttcatcctcattctctttactttgctccgccgattctctgcttgtctcaagcagcttctgttcacagtgaacattatccatgcctcggatgaacagaaggcacaggtctcactcgcagaaatcaatggcgggtacctcccgaggatgaactcggtctttcggcacttggagcaggggctgagcaggaatccgagcggttgggcggtaatctgcttgcaccaacaggcagatcatctgtctgacgttctgcaacctccaagatgccacaaatgtctcacaagtggtaatttggcagacagtgacgtgtctgcccccattgactgcttggccatcacgtatgagcagcttgacggaacggcgcaaaagctggcagccggcctgctttcagcaaatgctcggccaggatcatctacgttattgatgctcatcccgaacggggtcgagtatgcgcttctgacgtggtgctgcgtcctgctgaaaatcacctatgtatgcgtcgaccccgacattgtcagcgtgtccggatatcgcgggttgagagacattatgaggagcgtcaggccgtcaatcgtggtgaccgcggggctcacgcaagcagcagtgctggatatcgcgattgacgatctgaatctcgcaccacccatccgggtctcattaggcggtaaaccgtctaagggctggcgatcgttcagagacatgatcatccgcggtgcctcgcatggaagtgagattgacacgtccaaacttcgcgaagcaggggcacatgacgatcttaaccgcatcaactccatcatcttcacttcgggcacgtcggggattcccaagggttgtcccctgcgtgtagcgagcatgtgtcagatcctggaatctcagtcctggctcgtcaacgaatccaactcggctcgagcactgcaagcggcgcacaactcccggggcatcgcagcgtttcagacattgcagacgtggagagcaggtggtgcggtcgtcatgctctccaagagctgcgacatccaagagatgacgcaagcgctgagaaaccacgcaccgacattcatcgcagtgtctccgtccatggcgtcggcgattcgagaagagatgacgatggatccgttcatcgcggactcggtcaagaccgtccaggtcggaggcgaagccgtaaccatcggcgccatggaagaatgttcggccttgttcccgtccgcaaaggtctgtgtcaaccacggcatgactgaagggggcggctcgttctactggcccttcttcgatactccgctggaccagatttcacggttcggagaattgtgccccattggcgccgtggcccctggctcggccgtgcggatctggagcacgtcagtacagcgtgtcgcccagagaggcgaggtcggcgagctacacatccgtggtggcagtctgctgcgtcaatatatgggcggcagatcgccaggctcgttccgcgacgatgattgtggtcattggttagtgacaggcgacacagccatgattgatcgagaaggtctggtattcattcttggccgttcaaaagacatgattgttggcaccgccgggatcatcgtccctgtggctatcgagactgtcattcagaaatatctaggcggggcgcaggcagccgtgctttcgatccaacatcctacacgaggacaagtgcctgtggccatcatcaaagagtacgctcgtcgcacgggccccgagatcatgtcgcatgtgacgactatcctcggccagacatatctcttagctggagtcgtgtctctcaagcagcttggattgacggacttcccaagaaacggcagtggaaaggtgtccaaacccgacttggaagcggctttgcagaaacggttcggatcgaacgtgccaaaagttgcttga

SEQ ID NO: 249 - DNA, 441 bp, Cladophialophora yegresii
atgaccgccctctccctcatggcagtccccgtcctcttggaaacgacatctctcccagcccaactcttccaccagtgggtgaccatgtacggctacgggcatcgcgtgctgcccggtctcgcgatcgtcacgtgcctgatctacctccgcgtcgctttcacccggcggcgtgcaaagaaccacgcctggcccctatacgctctggcagggatcgtgactgtcagtatcgtgccgttcacgctgatcttcatggtgaagacgaatgacacgttgttcgggctcgagagggatgcgagggtgaaggggttggttagcatggatatcgagatggggaagcagcttgtcacttggtggagccgcttgcatcttatgcgctcggtgctgcccttggtagggacagttataggggtcacggccgtggtgggtgagatcaagatgtga

SEQ ID NO: 250 - DNA, 1644 bp, Cladophialophora yegresii
atgactacctcgtacgatgtcgttgtggccggagctgggcccgtgggcctctttcttgcctgcgagttggctgtagctggtgtttcggtgctcgtactggagcagcaagaatcgcccgagtcaccctggaaggttggcctgcacggcacgcgcggcctccacatccactcgatcgaagccttctaccgccgcggcttgctcgacaaggtgctccacaacatcgacgtcccagggcatgtcgggagggtgcctggctacgacttaaacttcgccgcgcactttgcctcgatccggctggaccccaaaaacgccgacttctcgcgctggaagtaccacttgccgctgccccagcccgcggaggccaagctgttctaccctgcccccacctccgtcgacacgctggagaagaccttggccgaacgtgctgaaagtctgggtgtgcgcatcctaagaggcgtggagttctccgattacacagaggacggtgagaccgtcaccgtctcggctgggaaccagacattcaccaccaaatggctggtcggatgcgacggcgagcgcagcagggttcgcgaagccgcgcagttcgaattccctggcacaccggccgagttcagggggtatgtcgtacactgcgaccttgccaacccggaagtgttgcagcgaggcttctgccgtaccgccgcggggatgtacatcttccccgcgcccggccacctgtacgtgacggactttgaaacgctgggcctcaagggcggcgacgaagccatcacgcgcgaacactttgagagcgtgctccgccgcgtctcgcagaccgagattgtcgtcaccgaactccaccgcgccatgtccatgaccacgcacctgaaacagacgaccacgtaccgcaagggccgcgtgttgctggccggtgacagcgcgcacgtccaccccagcttcggtgcccaagggttgagcatcggaatcggcgacgccatcaatctcggctggaagctggccgcgacggtccgggggattgcctctcccacactgctcgactcctacaatggagagcggcacccggagggagcccgccaactcgaatgggctcgtgtgcaactgtccctcctgcggtccaatccgtacagtctggcgaccgccaaactcatgaaggacctgattgccacgaaggacggaaacacgtttttcatcgagcacattgtcggccttacgaagctgtataatctcggcagcgcccacccggcgatcggatacagcgctccagactttgaattcgccgacgggtcgcgcttgggtgctaaaatgcgagaggcgcagcttttggtggtggactttactgacgaccacgccgtggcgaactacgttcaatcactggggtcggcagtgagatactctggatctcaacccaaggacgccatcgacctcaaggcattgatcgtgcgaccggacggcgtcattgcttgggcgtcggcggcggacaagattgacttagcggagctgaagaccgagctgggccggtggttggatctgtctaaattggagactgaagctgacgctacagcgatggtgatggagcgtatgacgttgaagaacgaggccgaaatatctgtgactgccattcccatcaccgcaacagtcgcggcttag

SEQ ID NO: 251 - DNA, 5376 bp, Cladophialophora yegresii
atgggaaacatgaagctcctctatttcagcaatgagtttccgaaggaggatctccagtacctctttcgttgcctccacaaccacagcaaggacagacgacataccattctcgctcagtttctccatgaggctactctagccgtcaaggatgaaatccgacacctctcaacagagctgaaacagttattcccaccgttcgaagatattcttacctgggctgagaatcccgagctgcgcgaagggctcctttgcggtgctgtcgacggagttctgctcacagtcgtccagcttgcaacatacattggttatgtggagaatcagccggaagagctggcgagattagaacagacatcactggcgggcctaggcatcggcttactggcactgactgccgtgtcgctctcctccgccgtggtggatttgccgctggctggtgcagatgcggtgcgtctcgctttccgtatgggctgccatgttctcgccgtttccgagaacttggaatctcgcgatctcgcagcagctccagagacatgggcctacgtgattcacaacgtcgatcctgtcgcggcgcagcaggcgctcgatgcaatccaatcgcgagaaaagatacctgacaccagcaagatattcctcagtgctgtcagccgaacgtcagtcacagtcagtggaccaccctcgagattaaaggcgctcttcagtcgctcagaattcttccgggactccagatctattgctctgcccgtctatggaggactttgccacgcgcctcatgtctacggctctcgggacgttcaaagcattgtctggggtagttcgttgaacgcaaacctcgcaaaatcctgtcccatcaccccaatttattccaccagtaccggtctgccattcagtgcctcgaatgcgggagaattattcgaatgtgttatctccgagttactcacgcatgcgatctgctgggaccaagtcatccggggcgtggttgctcaactccaaagtgctggtgccagccaggtagcgctttcctccttcggtaactcaatccccctcaacgacctcaaagcatccttggaatccagccttcctcaactcgaagcatccatcatcaatctagtaccatggattttcgacgctgcatttcccgcggcgtcaccgcgaggctcggcgcaatccaagctcgccattgtgggcatgtcatgcaggctcccgggcggagctacgaacacagagaagttctgggaaatcctcgaacaggggctcgacgtctctagacgaatcccggcagatcgcttcgacattgacacgcactatgacccgactggcaagcaaatgaacaagagcatgacgcagtacggatgcttcatcgatgagcccggcttgttcgacgcgcctttcttcaacatgtctccacgtgaagcccaagttgccgatccgcagatgcgtctggctttagtcacggcattcgaagcgctcgagcgtgctggttacgtcggcaaccgcacttcgtccaccaagctagaacgtatcggcacctactacggccaggccgctgacgattatcgagaggtcaaccaagggcaagaggtcagcacttactatattccaggaggttgtcgtgcattcggtcctggtcgcatcaactacttcttcaagtttgctggccctagttacagcattgatacggcctgctcgtctggactggcggctattgaggtcgcttgtcaagcgctttggcaaggtgatgtcgatatggctgtcgcgggcggcgtcaatgtgctcacaaatcctgatggctttgctggcctgggccacggtcacttcctgaccaaagggcataatgcatgcaaaacctgggacgccaccgctgatggatactgtcgcgcagacggtgtgggatctgtcgtcatcaaacggcttcaagacgcagaggctgacaacgacaacatcttgggagtaatactgggtgccggaaccaatcattctgccgaggctgtttctatcactcatcctcacgccggtcatcaagcatacttggcccgacaggtgcttcgtcaatctggtgttgatccattggatgtttcttatgttgagctccatggcaccggcacccaggctggcgactacgaggagatgcaaggcataatggacgtgtacgctccgctcgtcaagcggcgcagcaaggatcagcctctgcacattggcgctgtcaaggcaaatgtcggtcatggcgagtccgttgcggggacgacagctttgatcaaggtgctcttgatgttgcagaagaacggcattccaccacatatcggcattaaaacggagatcaaccctcgtcttcccaaggattttgacaagcgcaacgtccatatcccgttcgagatgacacagtggaagcagaaacccagcacaaagcgtgtcgttgctctcaacaactttggtgccgctggtggcaatacaaccatgattttggaagaggcaccgactcgcacaacaacagggagagatccacgccctacccaggtcattgccgtgtcggcgaaaagcaaggcatcattggcaggaaacattgagcgcctgatcgcttacatcgatgccaatccacagctcaacctcgctgatctctcatacacgaccaccgcacgtcgctaccactaccgcaaccgtctgacagtgaccgccccggacgccgctcatttaaagtcacagctcacttcccgtctggcgaagattgactccgtcaaggccctggcacagtccgatccaccattgattgctttcaccttcaccggccaaggcgcttcgaacaagtccatggacctcgaattgtaccgcgacgttccgatcttccgcgaacatattcagcatttggatcatctggcccaaggccaaggctttccatctttcattccggctctcgacggatcacatccgaaggatcatgcacattccccggttgtgactcagcttgctctggtgtgctccgagatggcgctggctaaatactgggctgctctgggcgtcaagccggatgtcgtcctcggtcacagtttgggcgaatacgccgcaatgcacgtggccggcgtcgtctctgccgctgacaccatattcatggtaggacgccgggcccagatgctgcaagaaaaatgcacaattggaagccacaccatgatggccgtccgagcctctcttgccaccattgcccagaactcgacgaataagccgtataccgttgcttgtgtcaatggaccttcggacacagtgctcagtggcaccaagcagcagatggatgaggtcgctgtgccactcgagaaggctggattgcgctgcattaagctcgacgtggcgtttgcattccattctgaacagactgaccctatcctggacgagttcgaggcaacggtgaagacgggtgtgattttccaggagcccaaagtccccatcatctcgcccttgctcggcagagtcgttttcgacgacaagaccttcaatgcgaactacgtccgccgagccacgagagaagccgtgagattcttccctgcactggagaacgcacaagaggtttcgaccatcaatgacgagactatctgggtagagattggccctcatcctgtttgcaccaattttgtcaaaacctccatcccatccacagccgtcgccgtcccctccttccggcgcggcgaggacaactgggctaccatggcagaagcaatagccacattgcacgtcgcgggtgtcaccgttggctggaacgagtttcatcaccccttcgaaagcagactccgcctcctagacttgcctacatacgcctggaacgagaagaacttctggctccagtacaacggcgactggtgtttgaccaagggcaatactttttacgcggccgagaaatcggctgcaacaggacagacgatctcaaaaccactgcctgtcagcgacttgcagacttcgacagtacagcaagtcgtcagggaggtcgttgatggctccgctggtacagtgatcatgcaatccgatctcatgcaaccggattttcttgctgcagctcatggtcatcgcatgaacgattgcggcgttgtcacatcgtccatccatgccgatatcgcttataccctcggtagctatttgtaccgcaaattctatcccaagtcaaaggacgtcaacatgaacatcgcggacctggtggtcacaaagggcctcgtcgcccaaagtaacaagaagctgcctcagttgatccaggtcaccgccgccacggccaacatcgaatccggtgttgttgaattgagttggcaaaacgttgacaacgccggtgacgtgcatgagccatttgccacggccaagatcgtctacggcgatgcttctgcgtggctcagctcctggctccctctgacgcacttgattcacagccggatcgaggcgctggagcagatggcggcaaaaggccaagccagccgattttcgcggaacatggcatacacactcttcgccgccaatctcgtcgactatgccgacaagtatcgcggcatgcaatccgtcgtgatgcacgatctggaggcatttgccgacgtgcagctgactaccaaggaaagcggcacctggaccgtggcgccctatttcatcgacagcgtggcccatctggctggattcatcatgaactgctccgacgcgatggatgtccggaacaactactgcgtcacacctggatggaagtcgatgcaatttgcaaagcctctcatcccgggagcaaagtaccggtcctacgtcaagatgatccccactgctgaggaccccaccatcttcttgggcgacgtgtacatcatgcaagacaacgccatcatgggcatggtgggtggcatccaattccgccgctacccgcggatcttgctcagccgattcttttccccaccagataagatggcggcgatggaggacaaagcggtgaaagttgcagctccgcaagccctactcccagccgcagcccacggaaagccagcgactaccacgcagcagcaactgccaaagccgacacgcttcagtgctgacgatgtcatccatccgactgccgtccctggaccgccgaaggacttcaaagccgccaccactgttgttgtggaagtctcgccgagcagtagcgaatccgagacgtcaagtgatgataacagcatcgtcagcaaagcccttgagctcattgcgaatgagggcgcgttggacattgctgacctggaagatgatgtccggttcgcggacctgggcgtcgacagtctcatgtcgctggtgctcgcggagaaattcagagtcgaacttgatatcaaggttggtggtggccttttcgtggactaccctaccgtcggggacctgtgcaagtggctggcggagtattacggctag

SEQ ID NO: 252 - DNA, 1008 bp, Cladophialophora yegresii
atgcaggacgataaaggaggctacaggcagatcaataaggcgttgaatatttgtgtctttgaggattacctcaagggtcagactgcagcacttccctatgttccagatgtcgagcagctcactgacagagtcattcgcatcttgggccagaatccaggaaagtttacctttcaaggaaccaacacttatgtcgtcggtaccggtaaacggcggattttgattgataccggcggtggtgagccagcatgggcacggcttgttcaatcaaccatggcgtcaaagggtatcagtctgtcccatgtccttttgactcactggcacggggatcacaccggtggagtacctgatctgctccacatttaccctcacctccgggactccatctacaagaatgacccggatcagggacagcaggacatctccgatggtcacatctttcaagtcgaaggcgccactgtccgggccatccacgtgccaggacactcggaagaccacatgtgcttcattttggaggaagagcaggccatgttcacgggtgacaacatcctgggccatggcaccagcgcggtagaagacttgggtgtctttatggctagtcttcagaaaatgtacgatcaaaagtgcctggttggccactctgctcatggcgtcaccatccaagatctcccaaccaagctcagaggagagttggaagggaaactacgtcgcgaacggcaagtcatgaacgctctcggtcggattcgtagccgtggcgggagaagtgtggcggtcaaggatctcgtcactgagatttacggtcagtctctcgacgaagagacccgtactctcgcattggaaccctttatcgacgaggtactgcggaaactcgctggtgatgggaaagtcgcctttgagaggagaggccgcgtaaagaagtggtattctgtggctgcggctcgattgacgccgagggaggtcaagatgcccacggccgttgtggttcaggtccaggagatttcagtagagtaa

SEQ ID NO: 253 - DNA, 2187 bp, Cladophialophora yegresii
atggacacaggattgactacagcagacaacaacccaatacgctggtccaggaatgaagcaccagctgcgccggctgggtcattctccgtcggcccaagcaacaacaatgacaactccacagagacgactatgccgtatgcctgccagacatgcggcaaacgaaaagtcaaatgcgacaaggcgaaacccatatgttcggcctgtcataagagcaagctggagtgtgtctatcaagcgcctcagccccggcgccgcaaacgaaagctgagcgacattgttcatcagagactcgatcaatacgagcgcatcttggcgctgcatggcctgctgccgcaagacactcttacgactacatcaacgcctaatgacgagccattacatgcccaagagccggcggcatcttccaccgggaaaccagcgtcagattccggcgcatcgaggatgggcaagttggtggcgggcgatgggaagtcaatatacctcgacagtcagctctggcgcaatctaggcgaaggacagaagcaaggcgccgctgacgacgacgacgaggatgaggagaccgaagaagaagagggcgaagcaggagaggcagaaggagaggatccagcaatgtcttttgtgggtgaccctttgaccggagcattcatcggttcgaattcaagtctgccccagaacctaacgcagtatcatccaagacacgcggaagccatgatcctatggcagacgcatgtggaaaatgtcgaacccatctgcaaaatcctccacgttcccacgacataccagatgttggaccgcgtgtcacgagaacccgacgcggtgtcgagagcagacgagtgcatgctgttcgccatctaccactttgccgtcttctcgctaacagaggatgactgtgccaggcaattcgggcaggcgcgcaacaaaatgctccagcggtttcactttgcgacgcggcaggctctggtcaacgcttccttccttcgaacgacggagatgtcgatcttgcaggctctcgtcctgtttttaatcccaggtcgcttcatctacgacccgcacacatattggatcctgacgggtgtggcggtccgcattgcccaacgcatgggtcttcaccgcgacggcgagcagttgggcttgcaaccgttcgaggtacaaatgcgccgaaggctgttctaccagctcttgccgctcgatggtatcgccagcaagatgtccggcacggggatcgccaccatgacagacccgtgggacacgcagcagccatcgaacatccatgacgaacagatctggcccggcatgacggagccgccgcaggagcggaaaggagccacggacatgatcttctgcctgacgcgtgcgttcgtcggaaaggccatggctcgagcggaacaatccaagcacgacacgcagagcaaggaggatgccgagctcctgattgccgagaccgaaagccaggtcgaagagaaatatatccgctattgcaacgtcgtcaatccgctccactatctgacggtctgtctggcgaggtcggccatcacggccatgcgtctccgggctcgacttcccaaggataagaaccaggcgatcacggacaccgaggcacgagaactgttccaactcgcccaggacattctccagacggacctggccgcgtcggcgaacacgagcctgaggcgataccgatggcatttgaggtccttctttgtatggggctcgtgggattcgctgatctataccatcacaacgctcaaaaagcctgacctgctttcgcccgcgacgacggacgccgcctggaggagggtggaggagctgtacaacagccacggcgagctcctcgagtcgaaacaagccttgcatatcgccatcagacgcatcacgctcaaagcttgggccgcgaatccaccccagagccgggtgcccgagccaggcttcgtcaccgaattgcgctccctccgtagaatgggccggaagagcaggccagacagacaaggtagtacaagtaatgtaactcctaccccaggcatggcggaaacagtcgatcagacgccctccagcgatgccaatgcgctgttgaacagcctgtctggcgttcccgggctggaaataatggatgactttagtctcgacacggtcgactggaccttttgggaccagctgattcaaggctaccaggcacagggtgggcagtaa

SEQ ID NO: 254 - DNA, 846 bp, Cladophialophora yegresii
atgttgccttttccgtccctgaccaaggaatggcactcggagccatattcctccattgacccaactcgaccggagttgtcggccaagggtaaagtcatcgccatcacaggtggagaaggcagtatcgggatagctgtggcaaaggccttcgcacgtgcgggcgccgaacgcattgcgatcgtcggccgctcagtcgacccttggtgcaatgccaagagagagatcgaatgccttggggcacgagtgctggccgtccggggcgatatctcagatggtgcctcgatctatggtgcttttgcaaccatcgagcgagaattcggcagagtagacgtcgccgtcgccaacgcgggatacctcgccacattcatttccattccggacgccgatcctgacgactggtggaaaggcttcgaggtcaacacaaagggggcattcaacacctcgcgcgcctttctggccgtggcggcgccgaaagcatatctcgtcgacatctcctcgggcattgtccacatgccagccaagccgggtgcttccagctatgtttcatccaagttggcggcgacaaagatttatgagacagtcgcagccgagaacgagggtctccatgtcgtttacatccagcccggagtggtccgtagcgagttgagtcgtaaggctggtatggcggccatggattcagccgatcttgctggccagtttgtcgtgtgggcagtcagccccgaagcaaagtttcttcgcaacaaatatctgtgggcaaactgggatgtagacgagctgaaacggcgcagagaagagttgggacagccacaccatttgactatccgaatgaatggactgcctctctaa

SEQ ID NO: 255 - DNA, 1314 bp, Cladophialophora yegresii
atggccgccaccaatccaccttcaacggcccatgccgccaactccggtcccactgtcgtactggagcttccgctgcgtaacagctgtgatgcttgtgcttcggccaagttgcggtgcaccaaggagaagccgacctgccaccgctgtgccaaacgaggcttgacctgtgagtacgtggccatcaaacgagccggcagaaagcctggcagtcggtcaagtgtcaatgaaggctctaccaactccagcacgggccgaccacgtccaccgcagagaacgcagtcgctacagggcggcaccgggcccagctctacagacaagctgaacgaacaacttgtcatgctcaaccaatctcttcccacgaccttcgtcgacctggacacagcctcggatgtttctttcaccatcgacggacccgaattcaattttctcaacacggcagagctgttgtcaagccatgtcgatggcggggccagcaattgcagctgtggcagtctcagcagcgccagcgcgagctgcgatagcaatgacggtggcggatgtaacaggcatgacagtttttcgactgctttgcccaacctcgaaagtaccgtgccggagtttttggcgctctcctcacccaatgctgcggcttggaataccgcgttcccagagctggaactgaccgaaacgtcgtgttcctgcctcgccgaagcgacaagtttcatcacacggttatcccttttgtcgtcaaccgtctgcaatacctgggccatactcgatctggataacgtcacgatcctccgagtggttctggacgtggtcgaacagaacaaggtcacaatcaacgcggtgagcgccatcttgaactgccccaactaccacgacggctgtctcctcgccataatctcattcgtcatcttcaaaatgctgagcctgtacgccgcgattgcgtgcaaggaccctaatctgcaagacctcccacagcccagtctcgcgcgcccgatgccgcaattagagtcggcgatccccagccctgccggcctcgtggataactacagcatggaaagaagtgatccccaacacatggcccgacgcattgtcctcggcgagctgcatcgcttgcgccatctgattgcgcaacttgtggaaaaactcaagtctcagtcagtaacacaggagagcggagaaggcggaaagacacaggagagtatggatctcgattgcgagatgagggcgcctctgtctacagtcatgtacgaacagttagacctcgatctccggcgacgactgaaagcactctcatgggccatcgtggatcgcatgacccggctctag

SEQ ID NO: 256 - DNA, 801 bp, Talaromyces cellulolyticus
atggtcgatacaggaggtggcgagcccgcgtgggcagaattagtcgaaactacactcaaatccatggacgtcagactatcacacatcctacttacgcactggcatggcgaccataccggtggagtccctgatctgatacggctgtatccacacctgaagcactccatctataagaatgatcctgataaagctcaacaggatgttattgatggacagttatttgaggttgagggcgcaaaactccgggctctacacgtgcctgggcattctcaagatcacatgtgcttcattctagaggaggagaatgcaatgtttacaggggataacattctcggtcacggcacaagtgctgtggaagacctcggaacattcatggatagcctgcagaggatgcttgggcagaattgcgctatcggatactctgctcacggcgtaaccatcgaagacctaccggctaagatatcaggagagcttggagccaaattgcgtcgtgagaagcaagttctccaagcgcttaacctgctacgtattcatggcgagaaaagtgccggcgttgaggacattgttaccgagatatacggcgaatctgtcgatgaaagcacaaaagctcttgctctggaaccattcattgacgaaatactgcggaaactagctggggacaacaaagtgggttttgaaataagaggaggcaagaagaagtggtactccgtagagatgttacagtcgactataattcgcaagcccgtaaatggcaaagcccattcaaatgttgacgttaatgtcaaaggaattgcggtttaa

SEQ ID NO: 257 - DNA, 795 bp, Talaromyces cellulolyticus
atgactatggcgacatatgccgttctaggcgccaccggcaactgcggcatcgctctgatcgacaacctcgtacgaagaaaggatgtgaaggtgaatgcatattgtagaaacaaggccaaattaattgcaaaattgcctcaagttaagaacgacaagcgagttcaagtatatgaagggagcatctacgatattgaccttttggtccactgcattcgcgatacacaagttatttttcatctcgttactaccaacgacaacgttcccagatgccatgtgagcttggatacagctagaagtatcatatctgccttggagaaaaccaaggtgaattcaaaggtgggcactaagatgcccaagattgtgctcctctcgtcaagcactatcgacgaccatcttagccgccatatggcctggtggttccggctccttttacggacctctgcatcgaatgtatacgccgatttacagcgaactgaggagtttctgcgttcccagcatgaatgggtttcgactatattcatgaaaccagggggtctcacagttgatgtacagcacggccaccaactcagtcttgaccatgatgaatcatttgtttcgtacctcgatctctctgctgctatgatcgaagcggctgatgacatagaaaaccgtttcgatatgaggaatgtcagtgttatcaacttgaatggctctgcaaagtttcccaagggaacgccaatgtgcatcttgatgggtctcgccaggcactttttcccgtttctgcacccttaccttcctccaacagggccggcttaa

SEQ ID NO: 258 - DNA, 1362 bp, Talaromyces cellulolyticus
atggcgttgagtacagctctcgatctctccgcatctcacttgggcatcgtgagaggacgtcccagctccgccggtgcagtgaaagagtgcaaccgcttgctacataagaaccatgagacatatcacatgttcttccgggagattgctggcatgaaccatatttcccatagccttctcacatgttttgcactgggcgccgatatccaggaacttcgagatcgttaccaggacgaggctgcagcccaacggccaatgccgcccttgaatgatgaactttgggagaagttggaggatcctaaggtgttcctccagaatatgtacgtcaagaaggaatacaacacgtttctccacttcttcgagcgacgcattgccgcaaccggctggcggaatgtcgtgcacgagttcatcttttctcgcagtcaggtcgccgagcgcatgctttcgagcatgttcgacggcctctaccaccccattattcatctcggattgggaatcgagttcaacttgcctggcctcgtggccgaggcattggctcaggctgcagctaacgacgacagcgatctccaccggctgtttggcatgtgtgagcaagaagctgcaagtcaagtcgtagctttgagtgaagaggccaagaagacatccatgctacagctactggacgccatgcgcgagaccgacgagatccgtacagccccgctgtggtcagatatgggactcaagatgcgaaacggcgtagtaggccgtgcaggcggctcctttgccgctctagccggtcgtttcagggtctcgacagaagatgaggaagaacttctagagcgtacggccgagatgatcagcacttgtgctcttatgtgcggtggtggacagcattcaggtcgtaaggaaaaaattgacttcttctggatgcactctatgaccagcagtatcttcatgagcattttagccgcacaaagggattggatctctcttgctgaccgcgctcgcctgctcgagtacaaagtgcgcaccgacctagcttggtatgtcgcgtcgggcagtgtcccactagatgacaagtacataacaaactacaccaacccagagagtgacggttggtcctgggacgacatattcagtgccgtcatcaagcagcacgatgatggccacgctgccaagttcattcgcgccctcaagaatggcgagattgtctgccagcagtacgaatctcggagcaaatcagtaggccgatttccagtcaagggagacatgtggctcaaactagctaggatgtgccatgacacgacgaaaaacatggagattgaccttaagtggatcagattcaccggttacgatgaagcatggaggcgaccagatctgttgtaa

SEQ ID NO: 259 - DNA, 1572 bp, Talaromyces cellulolyticus
atggatttcttcgaaattttcatcggccaaaggtggctctcccttcaaacttcttttcttgtgggggtttcactttactttttgtattggttgatcgtatatatctatcgagtcacgctgcaccctctggctaagttcccaggtccaatgcttgctggagctagcttttggtacgaattcttctacgatgtgtggcccagaaaatatcgatatatgtggaagattgacgaactgcacaaaaagtatggcccaattgtgcgcatcaacccgattcatattcatgtaaacgaccccaattttctcgatcagatatacgcacccgctggaaaggagaaacgcaacaatgacccgtggtttagcatggcgactgaatctgggatgatggcatggtcgacgctgcaaaccatggatcatcaccaacaccatctacgaagaagtgctctcggtcgtttcttcagcaaagcctctgtacgccagctagagagcctaatctcggacaagatcgatcaactgttgcaaaggttagctcagatgcatggtacaggcaactctgtcataaatgctacgcatgttatagctgcgctgaccatggacatcatatcatcgtactcgttgggcgtcgatatggacaatttatccagtgatgaatggggccgtgattggtctgagacgtttcctcaactaggaactatcaggccgtggggccgacagttcaaaagtcttacagtcatgtctcttagtattgacccaagcatcgtgcgctggttcaatccgactgcagctgccgtggccgagaaagcgaaatatcccatggaggttattcaggcacatgtcgataggcatgaaaaacatagtgcagcttcaaaaataaaaactaacagtaggacaatcttcatggagatactagacagtagcctgcctccccatgagaaatcgatcgaacgtctaaatgcagaggccttcctgcttcttggggcaggtaccgatcccactacacgcaatttgacggtgaccatgtatcatatcctagcaaactcggaagttttacagcgcgttcgtgatgaactcaaattagtcatgccacaaccggactgcccagtaactgtggccgacctggaggctttgccatttttctctgcatgcattaccgaaggtctccgaatgactaacgcagtttcgacgcgcattccccgcatttcacctgataaagcgattgtgtacaaggattggatcatccctaagggttctctgtatctactgcacatgaacgatgaaatcttccccgattctgctagatttaatcctcaaagatggctagacaacccgagcctcaagacacgttacttgatggcgtttggtcgtggcagtcgacagtgccttggcataaatcttgccaatgcggaattgttcctcaccttagcccgccttctcacccggttcgacttggatctttacgatgttatcagagagcgcgacattgatgttagtggagattgcttcaatggcatagtacgagatgatagtccaggaatccgattgaagctggttagagatcacctggccgaaatatag

SEQ ID NO: 260 - DNA, 483 bp, Talaromyces cellulolyticus
atgtcagagcaacctacgcccgacgaggtctttagctgcctagctgccttgtttgagtgggctgaaagttatgataccaaggattgggaacgtttgcggcaatgtctcgctcccattctccgcgtggattatcgccaggtgatgggcaagatttgggaagaaatgcttgcagatgaatttattccgctagcctcgagccctcatttcctaggcgatgaactactcaggacgcagcactttatcggcggcgcatctagctggaacaaggtatctgataaggagatacagggccatcatcaagtccgagtcgctcatcaacgctatacggatagctcgatgaaagaggtcgcgattcaaggccatgcccacggcggcgcaacgatgtggtacaagaaggtcgaaggcaaatggaagtttgctgggttatgtccaaacatcagatggggcgaatttaattatgatgagatattcgctccacggtga

SEQ ID NO: 261 - DNA, 1053 bp, Talaromyces cellulolyticus
atggcattctacccccccgacagtctacatttcccgccattatcacggccgttcctcaactcttatctgcctccattattatcagatgacaaggacacaacaaaggaagatgaactatcccgaccatttacaaccctcacattcgccacatctctcgactcttctctatctctggcaccaggtgtgcgcactaccctgtctggacctcaatcaaaagcaatgacacactacctccgcttccgtcacgaagcaatcctcatcggcgtcgggaccgcaatcgcagataatcccggcctgaactgccgcattgaaggcgcaagcggctacgaagaacacccaagccgggatcccgctattcaggctctggccgatgaggcgtcatcaaaccgcgaattgaaagatctcatgaaagttgttgccaactcgaaggcgacgcaagagcaattaaaaacatttcagagccatattgatcgggttcaagtagacacgatacgaaaacggcaaaactcactgcatcagccgaggcctataatcattgatccaaatgctagatgggtgcccagtgaatctagcaaaatcattcagttagttaaacaatataaggggaaggcaccattcgtcgtaacatcaaaatcaacatctccgcctcaggaagctcggcaagtcttggagaaatacggtggaaaatacatttccttggacactattaccagtgataaccctgatgatgctactggtacacatcaacactttgactggagtctcattctcaacactctagcaacaaaagaaaacatcaaaagcataatgatcgaaggcggcggctcaatcatcaattcgttactttcagaacagcgctatagcactctgattgactctgttatcgtgactattgcgcctacatggttgggccggggtggcgtggtcgtatctcccgaaagacgtgttgacgagaatggatgtgcgataccagcttcgaggcttacggatgttaaatggtatccgtttggagaagatgtggttttgtgtgggaggatcaaaggtgttgactga

SEQ ID NO: 262 - DNA, 1566 bp, Talaromyces cellulolyticus
atgagtgaattaaactcgtcggaaacaataacagcaagtaccgatgacctcgagaggacatacgatgatgagagaaaaggcgctcatcaagaagaacccgtccctcctatggcggaccatggcaacgactcctcgaattacagcgacgaattgcagaacattatttcaagttggaattcgcacgagcatcgcgagcatccgtataatctacctcgttggcgtatcaatgctacagccgttctgcttgctatgctggctttcttggtgcctttctcatcagcgatcatgtccccggccactggtcacattatggaagaatttgatagtaccagcgaactgctccaggcatttgtggtgtccatcttcgttctagggaacgcatttgggccactggtttgggctccattatccgagatctacgggcgcttatacatttatcacgggacaaacatcgcattcgtcgcactgacagttggttgcgcccttgcaccctctctatccgctctcatcgctcttcgctttctggccggtctatttggaggaacagtccttgccaacggcggcgcgtctattgccgacatgatgcccccttcaaaacgaggcttgtttatgggtctgttcatccttggccccgtcatgggaccggctcttggtcctatttgcggcggctttctctcgacagccaagggttggcgctgggttttttggcttgtggctatcgtgggtggttttgtggccatcataatggggttgatcactcgagagacttatgcacccgttcttcttcaccggaaactagaccgtgttcgacaacacaaggggcttcctgatggtggcttgagtgtaaaccaggatactgataccaccgtaacttggcggactattctgtggcgaggcattgtccgccccatgaaattactagtcagatcaccaatctcggcgctctgcgctatctacatggccatagcatatggtatcctcaacctgttgataacgtcgatctccattgtctatcaagcatcgtacggctggtcaacgaatatatcaggtcttgccttcatcggtcttggatccggcactttctgcggcaccatgatcatcagcactacctcagacagatacggcgcgtctgtagccgccagaaacggcgttgagcaaagaaaaccagagtatcgacttttcctcctcccggtcggcggattacttcttcccgcgggattgttcatcttcggatggacggcccaatacacagtccactggatagtccccatgattggcgaggcgcttaccggggttggtataatgattatcttcatgtccacgacactgtatctcattgattcttatacaatctacgccgcaagcgcacttgctgccaacggctttatgagatcgataggcggcggccttcttcctctggccggtttgacgatgtactcaaatctcggggtgggttggggtaatagtgtactggcattcattgcattgacgatcccaccgatctctttagttcttcaaaggtacggcgagaatctgaggaagaagtacgaacccaagaccctctaa

SEQ ID NO: 263 - DNA, 771 bp, Talaromyces cellulolyticus
atggcaagcgagaagactgttgtgctcgtcactggcgcaagcagtggcatcggctacgagacggtggccgctctgtccgccgcctcgtctgattttcatgtcttgctaggcagccgctcagtcgacaagggcgagaaagctctgactgacctgcagtcagcctatgggcaatctttgaagagcccaatctccgtcatccagctcgacgtatgcgaccaagagtcaatccaatcggtcaaaactgagattgaaaccaaattcggcaagctggacgttctcatcaacaacgctggcatcatcgtctaccaacaggtggaccaactgacggcactgcgtcagaccttcgacaccaacgttttcgcacagcagatcgtcaccgaatcgctggagccattgcttcgaaagtcagccaaaccttacatcatttacgtctcgtccgagatgggctctatcacaacacgtctagatcctactttcaagtttgacaaactccgtggcgaaccataccgtatgagcaaggcagctctcaacatgcttgctgcttgtcaccgccgtaactacgaggattggtgcaaagtcgcagctttcaaccctggctggtgtgtttccaacttgagcggaccgcagggtcttgaaatgcgcaagaagggtggtgcaagggaccctaaggagccagcccttgagatcgctaatattattctgggaaagagggatgaagatattgctaagaatggcatgcttgacactgacggaggcattttgccgtggtag

SEQ ID NO: 264 - DNA, 5409 bp, Talaromyces cellulolyticus
atgactatctacaccccaacatctggtggagagctcgacatgggcttgccaggagtgaaactcatatatttcggcaacgagtttcccaaagatgacttggaagacctttttcgccgcatacacaaccacagtaaagacaataatcactttatactaactcaattcataaacgaggctacattggcaatcaaggacgagatccggcgcctaccgactgaaatgaaacaaagtatacccccttttgacaccattttgagatgggccgagcctaacgagcttcgaaatggcttgatgtgtggtgctgtcgatggtgttcttctggtagtcgctcagctagcggcgtatatcggatatattgagaattcttccagggagtttaacgacagtacaaacttatgtcttgctggccttggaattggcttactagcatcgaccgcaatttctttgtccaaaacgctcgtcgacatcccacttgctggcgcagatgtcgttcgtttggcgtttcgtctggggattcatgtcatgggcgtatccgagaatctagaagctcgtgatttgtcagagacaccaagtacatgggcttacgtggtgcataacgccgattcagatgatgtccagagtgaactagattttatgcactctcgttcagaaactccggacactggtaagatttttatcagtgctgtaagccgcacttctgtgacagtgagtgggccaccaacaaggttgaatgctattttcaacaaatcgcaattctttcgagaaaagagattcattgccctgcctgtttatggtggattatgccatgctcctcacgtttacggagtggcagatactcacagcattgtccacgggacccatttgaaaacggtcagggcaaacttttcaccaacgattccagtctactccaccagcactggtctgccatacccattcaagactgccgcggacatttttgaaagcgtcgtgatggagctcctcacaaaggccatttattgggaccgtgtcattcatggtttggtagaccgaatgaaggaaaatgcgacatccgaagccgttctattcagctttggcaattccatacctctcaacgacctccagactgcaatcaaaaatgatgtgccctccgtcgaactctcaaccaagagtctgatctcatggcctttccatttgaatcataacgactttacacctcgcaccccagcccaagctaagctggccatcattggcatgtcttgtcgacttccgggaggtgctacaaacacagaaaagttttgggggcttttagaaaatggccttgatgtttctcgaagaataccagctgataggttcgatattgagacacactttgatccaacgggcaaggacctaaacaagaccatgactcaatacggctgcttcattgaagaacctggcttgtttgacgccccttttttcaatatgtcccctcgtgaagcacaggttgtagatccgcagatgcgcctttctttggtcactgcgtatgaggctctggagcgcgctggctatgttggtaaccgcaccgcttctacgcggttggaacgtattggcacatactatggccaagctgccgatgattaccgcgaagtcaaccaaggtcaggaggtcagtacttactatattccaggtggctgtcgagcctttgggcctggccggataaattatttcttcaaatttgcaggtcccagctacagtattgatactgcttgctcctccggtcttgcggcgattgaggttgcctgtcaggctatttggagtggtgctgttgatatggctgttgcaggtggtgtcaatgtgctaaccaaccctgatggctttactggattatgcaaaggccacttccttactcagggacacaacgcgtgcaaaacttgggatgcaaccgccgacggatattgcagagctgacggtgtaggctcggtcgtaatcaagaaactcgaggatgcagaggcagataacgataacatcttgggagttattctgggtgcgggaacaaaccattctgcggaagcagtctccattactcacccccatgcaggccatcaagcctacctatctcgccaggtcctcggaaaatgtggagtgaatcctttggatgtgtcatatatcgaacttcatgggactggcactcaagctggtgatcatgaagagatgcagggaatcatggaagtatatgcaccactgaccaaacgccgcaataaagaccagcctctgcatatcgggtctgttaaagcgaacattggacatggggaatctgttgcaggcgtttcatcattgatcaaagtactgctcatgctccaaaagaatgccatcccgccccatattggtatcaaaacgaacatcaaccccaagtttaaagatctcgataagcgcaacttgcatataccttttcagaagaccccttggcccacagttccaggtaagagacgacttttagcactcaacaattttggcgccgctggtggcaacacgacgatggtcctagaagaagccccggatcgtgttattctagagaaagaccatcgtccaaaccatgttattacagtttcagccaaaactaaaggatctttgaccgggaatatagagcgccttgttgcctatcttgatggacatccagatacaaacatcgcggatctggcatacacaacgaatgcgcgtcgctatcaccacagccatcgtgtagcaatagccacatctgatatagcacatctcacaaaacagctcaaatctcgtttagagaaggtcgatttggtaaatcctgttaaaagctccgaaccgccaccagttgcatttgtgttcactggtcagggcgcttcttacaaatcaatgagcttggaattgtatcgcgatatcccgacatttcaacagcacatccaacatcttgactcactggctcgtggacaagggtttccctcatttattccggcacttgatggctcgtttcccaaagaccatgcgcattccccagtcgttacacacttggcattggcttgcacggagatagccatggccaaatattggatttctctaggggttaagccagatgttgttctgggccacagtctgggtgaatatgcggcgatgcacatagctggtgtagtcactgcaagtgataccatatttatggtgggacgcagggcacaaatgctggaggagaggtgcaaaatcggcagtcatgctatgatggcggtacgagcctccctgtctcaaatagacgaagtctgtgctggcaagtcatataagtacactattgcctgtgtcaacagtccttttgatacagtccttagcggtaccaatcatcaaattgatgacctagcgtcggtgctcgagggtgtcggttaccgctgtattaagctggacgtggcttttgcatttcactccgaacagactgatcctattttggacgattttgaagctatttcaaagaccggcgttgtcttctcagagccaaaagtacccgtaatatcgccattacttggaaaagttgtttttgacggcaaaactttcagcgcaaattacgtccggcgggcaactcgagagacggtagatttttcatcggcgttagagagtgctcggatgatttctacgattagcgatgacactatttggattgaaattgggcctcacccggtctgtgttggctttgtcaagtctacaatcccatctacccaactcacagttgcatcgatgcgccgtggtgaggacaattggaaaaccatggcggaagccatggcttctttgcacgttgccagcgtggaagttggttggaatgaatttcatcgtccgttcgagagcaaactccggcttcttgatctgccgacttatgcttggaacgaaaagaactactggttgcagtataacggtgactggtgcttgacaaagggcaataccttctacaccaaggagcagtcgacccaggccaaatcaaccatcaagtccctaccacgaagtgaaatccagacaacatctgttcagagaattattgagcagacgttcgaggggccaactggtacggtggttatgcagtcagaccttatgcagactgatctactcgctgctgctcatggacatcgaatgaacaactgcggcgtcgtaacatcctcaatccacgccgatatcgcatacactcttggtgattacctataccgcaagctagtttccaaacccgagcaagccaatatgaatattgccaatcttgtcgtgacaaagggccttgtggctcaaagcaataacgaagtgtctcaactgattcgagtgactgctgttacgtctaatgttcacgccggcaaggtggaattgacatggcaaaatgttgacaatgacggaaacgttcacgagccgtttgctactgcagaacttcattatgaaagagcatccgaatggatttcttcttggactcccgtccatcatcttgtgcaaggccgaatcgaggcccttgagcgcttggccgtcgaaggcaaagccaaccgcttttcgcgcagtatggcatatactttattcgccaacaatttggttgattatgaagacaaatatcgaggcatgcaatcagttgtcatgtacgagctggaggctttcgctgatgtgcaacttaccacaaaagagcgaggggtttgggttattcctccctattttattgatagtttagcacatttaggggggtttgttatgaactgttctgacgcgatggacacgaaagacaatttttccgttactccgggttggaaatccatgcaatttttgaagccgttgcttccaggtgccaaatatcgttcgtatgtcaagatgattccgacaatcgaggacccaaccatcttcctaggcgacgtttatatcttgcaagacaactccatcgtcgggatggtgggtggcctacagtttcggcgttatccacgtctgctgctcaatcgattcttctcgccgccggatagaataccagccgtgggtgatgaaccaacaccacctgcaccaaaggcttcagtatcaacaccagcacatcaaacccaaaagtcaaaaccacggtcaaagtcagtttctgcagttcccactccagactccagcaatgccgtgcagagccaacgcgatactccgttgcaggaagctgctaccactggcaatactggccctgagccagcatcgtctgctgatactgcatctgcttcaggcagtatcactgccaaagcgctgatgcttattgcccgggaagcagcgttggatatctcagacttggaggatgatgccagtttctcgcaccttggtattgacagtttgatgtcactcgtcatagcagagaagtttatgggggaactaggtgtcaaagtcggtggcagtctgttcctggactacccgaccattggtgatttgcgaaaatggctggacgaatactatgcttga

SEQ ID NO: 265 - DNA, 1749 bp, Talaromyces cellulolyticus
atggtgcgtaacagcattctaaaatggagtttcctccagctcttaatcaatataaattttcagccggcatttgcagctcctagcaggcaaaatttgtcccatcatgagtacgattacgtggttgttggtggcgggcctgcagggttagtactggtagagcagctcaccctccaccctcaagtcagtgtccttcttctagaagctgggcccgattcgagtctggatccgttggtgtccactccggcttattggtttgagacatcggcatacctttggaactacacttctgctcctgaccccgccctcaatggacgtaccccggacctatggcagggccgggctctaggtggaggatcctcagtcaatggtatgggatactgtcgaggcgcatcgtccgtctttgatgagtgggccgagatttcaggtaacccaggattagcttggaactctatgttcgaggcattcaaggcaaccacacatttccaagaggacatacatccagaggaccaggtggcggtgaacctgacatcttttggtaacggccctgtcgagattactactcaacgctaccaactctcgctggatcggccgctcgtcaatctgttcaaatcgaccaagaacgtgcccgaaattgatttcgtgtctggttatggaatcggcgttacagaacagacggatgcaatccgtgctagtaaccggactcgaagctacgcatggaacactttcggctggcttgcagcaaatcgtcccaacttcgaggtacggcatgatgcctgggcatcgagaatcggctttaccggcaagaaagccgactctgtcacgtataacgacaccttgtcgaacacgatgcacacagttacagcaaataaggttgtcgtatctgcaggggccattggtagcccacagttacttatgctctccgggattggtcccacggcacatcttgaagcattaaatatctctgtcgtacatgactcgccaatggtgggacagaatctgatggatcatcactatgcacaactagtctttgaggcctccccgtccttagatacagtgtggcagtttaccggcaatgcaacgggaaggcagattgccgaagccgagtacgatacgaacggcgatggtctcttagggggtgttgacggaaatgtgttcagtgccatacgattgccagactcagttttcgctggattgggcaattaccacacgagtctgccagcagaccggccacatttcatctacgaatatgcgacggttcctttccagacgcagtatcaaaaccaaagcgttattacaccttttatggcactcgtccagcccgagggtcgtggtaatgtgaccttggctacgaatgattaccgcgaccatcccatcattaacgcagcttactgggctactccagccgacaaagccgcgatactgtacgcatacaaggactatcgttcactcatcggcagtcctgaactgaagcaatatctcccagtagaactgttcccaggagcgaatatcacaagcgatgaggacatatggtctgccattcagcagtcatcgggtagttttcatcacccgatgggtactgtcgccattggctccgtgttagatgagaattggcgtgtccacggagtcgagggtctccgtgtcattggatcgcccgctgcaccaaaaataatcacttgtcatactatggctacctcttacgcattgggctatcgtgctgcgcaagacattattgctgcggatctctcttga

SEQ ID NO: 266 - DNA, 804 bp, Talaromyces cellulolyticus
atgcctacatacgccgttctgggaagcacaggcaactgtggttctgctgtagtccgtcgtctcctcgagaaatcccctgatacgcaaatcaaggcttattgtcgcaacagggctaagttgtacaaagtggtacctgaagtccttgataataaacaaatcgaagtgtttgaaggcagcctcaacgatgatgcgctcatggatgatctgctacaaggcacaaaggcggtattcctagctgtaacgagcaatgataacatcccgggaatccgcctcaataccgacactgccatggcagtcctgagatctatctatcgactgcgtgatagaaatggcccggcttcatacgtgcctccaacgctggttcagctcagcgcgagtgcaattgatgatcaccttgcaagcaccatgtccaaatatttccgctggatcattgttcgcgccgcctccagaatctataccgatcttcagcgtgcagaggatgtcatgcgatcgcacgaccattggatcaaatccgtctttatcaagccgtccggcctgtcgcccgacatagcccgtgggcatcgtttgacctttgacgagcaggagagctttgtgagctatatggacattgctggaggcatgatcgaaattgcagatgatgaagacgaccggtatgttgggagaaacgttggtgtcgtcaacgtagtgaaaggccagggagccaaggtccctagaggcacgctgatgtgtattacaatgggcttcgtacggcactacttcccatggatgcatccatacctgcctgaaacgggcccggataaataa

SEQ ID NO: 267 - DNA, 798 bp, Talaromyces cellulolyticus
atgacctctcaagacgtccacgtaccatttcgcctcgatggcaaggttgcgctcgtcacaggctccgggcgtggcattggcgctgctatagctatcgaacttggtcatgctggtgccaaagtgatcgtgaactatgctaagtccaaagagcctgctgacaaagttgtttctgaaatcaaaaagttcggctccgatgccgtcgctctacaagcggatgtaagcaaggtttctgagacagtcaaactcttccaggaagcccttgaaatctggggcgggttggatattgtatgctccaacgctggtgtcgtttccttcggtcatcttgaagaggttaccgaggaagagttcgatcgtgtttttactataaatacacgcggtcaattcttcgtcgcccgtgaagcctataagaacctgaacgaaggtgggcgtatcattcttatgagctcgaacacagcccgcgcctttgcagtcccccgtcattctgtttattctggctcaaagggcgccatcgagtcttttgtcaaagtgcttgctatagactgtggtaaaaagaagatcacggtcaatgctgttgctcctggtggaactgtgaccgacatgttccacgccgttgcacagcactatatccctaatggagatcagtatgaaccccaacaattgcaagagatggctgctcatgcctcgcctctcattcgaaacggttatcccatagatatcgctaacgcggtggtatttttggccagcaaggagggagaatgggtcaatggcaaggtcattggcgtggatggcggggcctga

SEQ ID NO: 268 - DNA, 795 bp, Endocarpon pusillum
atggctccaagagtcgtcttgatcacgggtgccaacactggcattggttttcagattgtgaggtcactctgcagctctgatcaagcttacgacatcatcgttggtgggcgatcgctgtccaaggctgaggatgccatcagctccgctgttaaggagttcccctcctctcgcagtaagctttttccaattcaggtcgacattgagcaggatgactctatcaaacacgcgttcaacgaggtgcagtctaagttcggaaagcttgatgctttggtaaacaatgctggcgcgcagctcgaagcgcagtttgccgctggtaagctgacggagcgcgacatttggaaccagtcatggaatatcaacaccgtgggggcgcaagtaatgacctcaagcttcatacctctcctgctccagactcctgacccgcgcctgctgttcatcacgtccaacgcgtccactctcgctggaaccgagaaccttgctctacccattgaccgctctcctcctaaagggtggccgaaacgcggtttcagtattgcggcataccgcagtgccaaaagcggcatgaacatgatgatgcgtgaatggcaccgcacgctgaaggaagacggtgtgaaagtatggtgtcttgctccaggtttctcggctacgggccttggtgggaatccggaggcctcaaagaaaatgggagctggtgatccggcggtggcgggccctttcatcaggagtgttttggagggtgaaagggatggtgacgttggtaaggtcattacgaaggatggtgtgcaggcttggtga

SEQ ID NO: 269 - DNA, 2343 bp, Endocarpon pusillum
atggcgccatcagagaaaccgacgcagtcatggtctactcatgacatagcttgtactcattgccgcgaaagaaaaattcggtgcgggcgtgagagaccacaatgtgcacattgcaggcgtgatggagtggagtgcgaatactcaacccctggcaagagggtcaatcatatcaagctattatgcaacaacattggcggtcttgaggatcgcctgagtaacatcgagggcgagctctcacgcttgatgacattactcaaggccggtgttcatcaaaggccgttcatggataactcaacaaccgaagagtcgtcagccactttatcaatcaaggactctcttgccgacgtgacatcctgttcgttgccgacgcatgatcagggggcgtgccgtcataatgatcctatagatcgtcatcatggtccttgcactttgttagctctttgtaacgccttcagcgataccatcttgtcggagcagtggacacccggcccggctccgggcaaggaccagttaccaaaatccaataaacaggaagacttcgcaaagaatgaagcagtcaaggacgtgctcgtccgtatgtgtctcgaagccggtattgaagagtcttttgatcttcaaccgaatcacacccccatccgacttccacccaagcagttcctcttcatgatacaaaatcaatgctttcagcaagcagactacgcgacagatatatttgtgcaatcatccttctggtctaacgtggaacgaatctatagccaaccctttacgccggccgacaaagcttgggcgatctgcttcaacacaattatcctgctggtccttgggtcagaagtgcaaattcaaaacagtgatccaatagtcgaatcacagttcgtcctaccattcctctcaacagttcgcacagctctaaacaatcctcgcgtcctgatggcgccaaagttgatcaatgtgcaggctttggcacttttgagtctcgctgctcaacagtactatccgccaggttttgcggactcgatttttgcgcaagcttgtgtactagccagaaccctaggtctccatcaaacgccgatggcatcagataacgctagtccagaggaacagcaagagcgcttcaaagtcttcaaatcattataccttcgagataagagcttcacgatttcgcgaggatctttctgctggcttccaggttccgattgcagtctctcctctcagctcgaccagagtgccattgctgatccaaaactcgcctctcgggtacaacttgccaagttgcaagaggaaatctaccgattatttcatccagcggaatcacaaaggcgatgctcgattaggcataagactttactgttacgcatcgagcaaagtcttgagcgttgggccgatacccatgatattttcacctcagttaatactaaccctcgcaatgtcgacttgcaactcgagtttttagcggcccgcatcagtgtcctgcatggcagtcttgagcccgttcattgtgatcagtctatgtttcagcgacctgacggtctctcaatctcgaaaagcccatcgctgaaaggtctcaacaaatctaccagtcgtcgatcgagcaaagacaagacctccagcaacgacgcttgctctggcagcacagaggaaaatgcaaatcaacctatatcgttacgttcacaccgtctgccagatactttctcggcacacggatttttcttactagcaaggaatcttatacagccaatatcaacagacgatgaatcacaagcagacgaagacatgaatctattgcagaaagtatgcgcatgctacagagaacttgaagggggaagtcaagcgaacaaccacacgcgcaaagttggacacgctttcggaagacttttgcaagtggtaaacctcgttaaaaatgaccaacaacttcaaccattaccaaccatgctacatcaggcaagcaccgctcatactccacccagcactcaaaacttctttgctggccaacaaggactttccgacttcacagacctgtcgactgcatcgtcttacccagcacctcccatgccattggagggcttctcctccaagaataactctaccgcagcgaccacctcggtcagtacatgcccttcacctggcttacttactccaatggaactggaattcttttctccacatttcgagcagccgcagagtataatgtcaccgtcgggcaggaagcgagtgcgtttaagtgggccgaatgctgttatggatgaatcacccaactcgaggcttctttccgaactcctggccgcaagccctatgatgtcgtttgatgttgcggcgcaagaggacatacataccgctgtattatag

SEQ ID NO: 270 - DNA, 1563 bp, Endocarpon pusillum
atggattctgctgcagatcttcgagggcgaggtagctggagctatagcgcagccgaatatcctgtggtcgctgtgacggcctgctctgttctcctaattctatgggcgatcgctcatatcctttataacattttccttcatccgctcagaaatcaccctggaccaaagctctgggccgcaactcgcgtaccatggtgttggtatcagtaccaaggcatcctacacgagcgtttattggagcttcatgtcaagtacggtcacactgtccgtatcgctccttacgaactctccttcacctcagacacggcatggaagacgatatatggacacagatccgtggagatggacaaggatcctgtttttcgccttcacactcctactggagcacagaatatcctggtggccgaccgccagacgcatattcgccaaagacgactgctttcccatgcattttctgaaaaagcacttagggagcaagaaggtattttacaaacatatgtgagcaagctgttggaacagctatctttgagatatactgcaggaccgctgaacatggtcgcatggtacaatttcacaaccttcgacctgataggagacctgtcgtctggcgaaaagttcgggtgccttgacaagggtgattacgtccccttcgtccgcgcaacggagaggatagcaaaagagctcaccttcacccaaatgctaatctacttcggcgtggcgggcgtccggcaattcttcttgcccaaagctgtggccggccagcgcgctcagaacatgaaacgcgcaatcgacaccgtggagcgacgaatccaacgggacactgaccgaaaagacttcctctactatatcctcgccgccaacgacgagaaaggcatgagcagggcagagatccatgtaaattcattttccttcaacatcgccggctcagaatcaagtgcgactgctctttccggaataacataccacatcctcacccgctcatccgcctactcagaactcatccacgaaattcgcacctctttcacgtccgaagaagagatcacaatcgccagcaccaacgacctcaaatacctcgaagccgtcatttccgaatctctccgtctctacccgcccgtcgccggcaccctcccccgtgtcgtgcccgccccaggcgagaccattgatggcatccatgtacccaccggcaccactgtcggtgtccaccacttctcttgcttccgccacccggctaatttccaccgcccagacgagtttctccccgagcgctggcttccggaatgcaaagatgttccgccgtttgacaaggacaacagggcggcggtgcagccgttctcattcggtccacggaattgtttgggaaagaatctagcacgagcggagatgaggctgataatggcgaagctgctgtggaggtttgatttagagttggttccgggtgggggagggagcgggaagggaatgggaatgggaaatggcaagagttggagggatggacagaaggtctggggtttttgggtcaagccaccattgatgtgttggctgaggcctgtgagtagagattga

SEQ ID NO: 271 - DNA, 6495 bp, Endocarpon pusillum
atggatgattcagtccagccaaacccctccatgcctcctatactagtagggtccacgcaagcttcgtgccaactattcctctttggggatctaaccacatctttcgagcaagaccttcgtcgacttcttcatgtcaaagataatgctaccttacattccttcttcgagaaagtcagtgctgcctttcgtacggaatttgggaaactccctgctcgtcagcaagccttgcttcctcgctttaccaccattaccgatcttcttgcaaatttgggtgagacagaaggaaagccagccttgagtttcgctctccactgtctctgtgagattggtcaattcattagatattttggagaaggatccagaccttatcctagcgatgccaacacctatcttgtggcactgtgcactggctcgtttgctgccgctgcaatcagtacctctcgaacactttcagagttgattcccgcaggaatcgaagccgttcttgcagccttcaggaccggtctgtgctcgctggagcttcgaaatgatatagagcggccgagcagtcgaatacctcgatcttggtccgcgattgtgagtgcttcagaagcacaggccgctgaacttctgcagagtttcaactcaaaaaacactctatctggaagctccaggctttttctaagcgccgtttcgccaaacagtataacaatcagtgggcctccaagcattctacacaactttctggcttcagtttctttgaactcgtattgcctaccgaacgagtcgccgttccatgctccttccctgtttgggtcttatgaggttaatgagataattagctacttccctgatgaattgcttggttcatacaagccgcgaattcctctgttatctgctgcttccggcaaacctatcgtcgctgaggacttcaagaccctgctgcatacggttgtgtcagacactctgtgcgagcaggttcgatgggacaacatcctccggtcgctcgtggaagatgtcttccagcagaagtccttcaaagaatgcacaatatcacccgtattgtctaatgctgctcacctcctctcttcagcaataacgcgcgccacaaaaatcaatgtcacaacgaccaatttgttgaatctcggcgtctcggactcccagcctgccaggcctactggtaaattcgagcagtcaaagatagccatcactgggttttcaggtcgtttcccggaagctgcatcgaatgaggaattttgggagctgctaagtgcaggacgagacgtccatcgcacaattcctgaagatcgcttcaactggaaaactcacttcgatgcagcaggtaaggtaaagaacacaagcagggttcagtatggatgcttcatcaatgagccaggattatttgatgctcgatttttcaacatgtcccccagagaatctcaaaacacagatccagctcagaggttagccatcacgacaacatacgaggctatagaaatggcaggattggtccctaacaggacaccttccacacaacaagaccgcattggtgtcttttttggggtgactagtgatgattggcgagaggtcaatagcggccaaaacatcgacacatattttatccctggcggaaaccgtgcatttgtccccggacgcataagctacttctttagattttctggtccaagcctgagtatcgatacagcatgttcctcaagcttcgctgcaatccaaacggcgtgtaactatttatggagaggagaatgtgatactgcagttgccggaggaaccaatgtactcaccaatcctgacaactttgctggccttgatcgtggacacttcctatcgaccacaggaaactgtaatgcctttgatgacggtgctagcggctactgcagagcagacgccgtggggtccgtcattctcaagaggctcgaagatgcgcaagcggacaacgatccaatctttggggtcatcgatggagcttttacaaatcattgtggtcaaacagaatccatcacaagacctcacgagggcgaccaagcttccgtctttaaccggatcatgaggaattccaacgtcaatccactggatgttagctacatagaaatgcatggaactggaacccaagcaggagatgctactgagatgaattcagttctatcagttttcgtgcctggtcgcgagcgaatgccacaccacccgctatatcttgggtccgcgaaagccaacgttggtcacgcagaggcagccagtggtgtttctgctttgatcaaggtcctgatgatgatgaagaacaaccagataccaccgcattgcggaatcaaaactaagatcaaccgtaactatcctcttgatctcaaagagcgcaatgtcaacattgcgttgaaaactgtcccttggcatcgaactgattgcgtcggtgggaagcgcacatgttttctgaacaatttcagcgccgctggaggtaacacagccgtgctcctagaagacgctccgttacctcaatcagaaaacacagcaatagagactcgctcagtacatcccgtcatagtgactgcaaagagtgtacagtctctgaaacaaaatatcgagtccttgatcacctttcttgagaagaacccgagcacctcgcttccatcattatcatacactactacggcacgacgaattcaccacaattaccgcaccatctgctcagggtcagacatcgaatccattcgggacgctctcaggcagaaagccagcagttccgacatcaagcctattccaaatgtaaccaagcttccgaaggtggccttcgtcttcacaggtcaaggctgtctgtatgcaggtgttggcaaacagctattcgagacggtctcgcatttcagagctgatattcttcggttcgacaacatagctcagcggcaaggtttcccaagctttttgcctgtggtcgatggtagcgtcgccaatgttggtgagctagagccagtggtttcccatttggcagtgacatgcgtgcaaatggcgctttctcgcctctggatctcttggggtgtggttccgagtttgacaactggccacagcctgggagaatacgccgccctctatgcggctggggtcgtgacagccagcgacgccattcaccttgttggtaccagagcacagttgctatcgaagcattgcaataaaggaacacatactatgctggccatcaaagcatctctcgactccatcaaaccccgtctaagcgcctccgtctgcgaagtcgcttgtttcaaccagcctgccagcaatgtgatcagcggacccagcgaagaaatcagccgcttaatgagggaatatcaatcagacggtttcgaatgtatcgagctagacataccgttcgcttttcattcagcacaagttgagcctatcttggagctattcgagagggcagccaacggcgtccagttccatgccccttcaattccctacatgtcgcctttgctgggccgcattatctcagatggtgatgtgttaggaccatcataccttgctcgagcatgccgcaatgcagtaaacttccaaggtgctcttcaggctgcgaaagcttcatctgttgtcaacgagaagtcagtctggttggaaattggatcgcatccagcttgttctggcatgatcaagggaacgctgggcacacatgccttgacaataccgtctcttaaaaaagctacagacacgtggaaagtgctagccagcgggctcgaatcactttatctcagcggcattgagatcgattggaatgaatatcaccgagactttgagagctcgcataaggttctagagcttccaaggtactgttgggatttgaagaattattggatccagtacaggaatgacttctgcctcaccaaaggggacgatccaccaccacaaaaagaaattggtgctgctcctgctgttgagcagaagcctgtgcctctctatatttcaccctctgttcaacgtattcttgaggagcacaatgcagctgatgtgtcaactcttctcgccgaatcagacatacacgatccgcgacttgctcccatcttccaaggccacaacgtgaatggtacagctctatgtccttcatctctgtatgccgacatcgccctgacggtcgttgattacatgctgaagacaaacgatatgcaaaatgatactactggccttgacgtgggcgacgtgaaggtcgacaaatcgcttatagctgattctaacgctgtgacacaactacttcgtatttcggcgtccgcaaattggtcaaccaaagtcgtttcacttgccctctacagcattaacgcacagggcagaaagttagccgatcacgcgaaatgccaggtccggatcactgaaaagcagtcatggtttcaagagtggaagcgcagctcgtatctcatcaagagcagagtcacatcactttacaaaggagtcgatggaggcgattcgcaccagatcaagcgtggcatggtctacaagctgttctcttccattgtggactatgatgcaagatatcaagccatgcaagaggtcgtactcgatagcaacgagctcgaagctaccgcacaggtgtcattccaggttgatgatgaaggattcaacttcaacccttgttggattgacggccttgggcatatcgctgggttcatcatgaatggaaatgacaatgttcactcgaaggaccaggtgtttatcaatcatggctgggataccatgcgatgcgcgacgaagttcaggaagggcaagacttaccgaagctacaacaaaatgcagcttgtgagtggatcattatacgcgggcgatacgtatattcttgaggacgacaacgttgttgctgtcattgaaggtgtcaagttcgctggaataccgcgccaagtcctgaaccaggtattgcctccaaagtctggagcagcaggacccgcagtgactaaatcgcgttcttcaacgcaatcaaaaccggtgccgatggccacagccaatccgcttccaaaatcaactcgcacagccacggctactccgctccccaaacaagcaatatcaccaccaaactccaatacaaagcataccaaagcgtcaccgacgaatagcattgtgcccctagtattggcaatcattgcagaggaggctggcctcgacgcggccgagcttggaccaagcagcgaatttgccgattatggcattgactcattgttgtccctcaccataactgggagaatacaagaagagctcggactcgatctaccctcttcactctttgtggaccagcctactgtgaaggaatttacagtgttccttgatagtagcaacaacaggcccttgttgtcaagtccttccggcaactcgacgccagtctcaaatccagagcaagaaaccctttcggaagctacgccggaagactacgaaacagacgcaacatcagttacagacggccaaagcgtgatggaaatcatccgcgccacgatcgctgcagagactggtgtctctcttgaggacttgacaccttcgacgagtttctcagagcttggtgtagattctctgctagcgctcacgatcatgggaaagcttggtgaagtcttagaaacggatcttccgcaaacacttcttgccgataacgacaatctgtccgagatcgaaaaggcattgagcctgaagctgaagggaccagacctcaaccgaaatcctgtggctacttctccaagagcggacccgttcgaccccgagatgcctcctcacgccacatcagtcaagctccaagggaatcccaagaatgccacaaagacaatattcctctttccagatggttctggatcagctacctcgtacgcttcaattcctaaactctcgcccgagatcgtggtgtatggcttgaactgtccctggatgaagacaccacaggatatgaaatgctccttggaacacctgacaagcaaatatattatcgagatccgccgtcggcagccaaaaggcccttattactttggtggttggtcggcgggaggaatatgcgcatttgaagctgcgcaacagctggccagccagggtgaagagactagacgactgatattgattgattcaccaaatccagtcggcttggagaatccgcctcagcgcatgtacgacttctttgaaagcttggactttttcggcatgaatggcaaggcggctccaagctggctacggccccatttcaatgccttcatcagcacgctggatcattacaaggtgaaacctttttcaggtccacggcttgagactcacctaatctacgctcgtgatggaatttgcaaacatcccagtgatcctcgaccggagattcgccccgatgatcctcgggagatgctctggcttctcaacaatcgcactgatttcagtggcaggggctgggatgacttggttgggaaggagaacctgaagatccaagtgttggacgaggtcaatcatttttcgatggtggcgcctggtccgaaaattcaagagctcggtgctttcatcgcacgtgcaatggagtga

SEQ ID NO: 272 - DNA, 432 bp, Endocarpon pusillum
atgtcgaaaaaactcttcgccttgaccatctgcggctatcgcaagtcaggcatggacgaggacgaataccacagatacttaagcgataatcatgcacctttactgaaggatctgttgatcaagaacaagattattgattatacaatgcaacacaacacgagcgaaaccaagaagatgatgggccaaatattcggaagtctgcatgctggcaacgttgctgagtgtgactgcttcgtccagattgtattccgggacgttcaggacttcatcaacgtcaaagaggacccccattacaagaagatggtggtgcctgatcatgagaacttcgctgatggcaagaggactacaatagtgactggctggttcgagagtcatattccaagcaggcacggtggagcaattgagaatggagtctcgataaatggacattga

SEQ ID NO: 273 - DNA, 1146 bp, Endocarpon pusillum
atggccattcactggtccctcgaccatctcgagaagctcctccccaagcgactcttcgctaagctctcagagatttcttgcaatcccaacgttcccatagaagctggtggtaattacccaatcatcaatgccgagaccggggatctgcttgccggcgtgccgtacgccaggggattccgcgttcccaggagcaaaatgcgcgctttgtgtgctgaaggaattgatgtccagtacggcaagaaccttacggatcttgcgttcagcgagaagggtgaccttgtgttcgcctcgtttagcgacggcacgatcgcccaaggctctgtacttcttggcgccgatggcccacgctcgaaagttcgagaattcgccatgtctggagcagaggcagcgcaagtcagcaagtttccgatctgtcatcacaatatgactgtttgctatcgagatgtggataaggcaaagtatctgagacaacggtttccaacgagctatttggctctgagccagaagtcgcaccacgcttttcagtcgatctctagcatgcctgatggtcaagaccatccagaaacatggttgtttcatctcgccatggcctggctgggtgacccggagcactcactcagctacgaagagcgtcttgccatcattaaggaacgtgcacaaggtatgggcgagcctgctcgatcagcattcacgtggatccccgaggacaccctggtccacaaggcagacatcagctattggatcacgcaaccgtgggacaaccgtggaggtagagtcacccttgtaggagatgctgcgcatcccatgccaccctatcgtggtcaaggcctcaaccactgcatctgtgacagttctcacctcctcgatggtcttgagctcgtacgtgccaacaaggcaaccatcaaggatgccattactgcctacgatgaagaactcgtccctcgcggacgtgacgaggtcaaatgctcgttggagaacggcctcatgctgcatgactggcagaaggtgaaggagagccccgtattcaggaacggattcaggcctatgactggtcacgacggcaaggaggctcttagtgagcatgcgcaggcgcagatgaagagggatgaggaggagcagagggatatccctgtcgctgcgacttga

SEQ ID NO: 274 - DNA, 1080 bp, Endocarpon pusillum
atgactacatttgtagaatcatccatctcgccgcttttcgggctgtggcagcctcttccccacttgaaacatctctattatggttcgtcttgcgttcaaaagcatctattcgcgactctcccttcacacgattcgaaagttttcatcgtcacaggaaattctatcgcgaccaagactcctcttcttcaacaagtcgagactttactcggagatcaccatgcgggaacattcaccaaaatcagacaacatgcgccaatggccgatattgaccaagccacggagatcatcgccaaaaatccgttggttgatactatcttatcgttgggaggtggatctcccatcgattccgcaaaaacaatatcattccgcatgcatgagagaaatggcaaattcctgacacatctcacgatccctacgacgctgagtgctgctgagtgcacgataggcggcggctacacgaaagcagacggtgtcaagacttcagtaatgacgcccgaaattggtgtgactgcagtattttacgacccgggctatgccaaatatactccgttgaagctatggctatcgactggtatgcgtgctatggaccacgccgtggaatcacaatatcagccatacgcgtcagagatgccatggagggcaatgtcgtcttgggcagtgtccaccttctttgaatgtctaccaatagccaaggcatctcatcccagcgacgaagacgttataacgagattactacttgctgcgtttgccagcttgggcttccgcgatggagagactagctgcctcactctcggtcccgtggtccagcttaaggcgcgggccaagcaagaggacgcaaaacaaattgcaagactcctgccttggattggcgggacgtcgagcggtgatgatctcaaagatgctttggaggtcggatgcaagatcagtgcgttagtagagagcctgggattacatcaaagccttacagagaggggtattggcagagaccagattccaatcgtggtggaacgggctactggtggtttgaaagaaggctcactatatgacatcgtcacgcttttggtcgagggtttatactaa

SEQ ID NO: 275 - DNA, 1311 bp, Endocarpon pusillum
atggcgcgagaagccaatactgccacgatgctcaccctcgctggggaaatctttggtcaaacttaccagttggaaaagttcatgaaggagaaatccatcaaagaaccttctcttgccgttggagcctacactgagctatggtcgtcccacacgacagaaatcgctacagctcagaccagcatcctcgacttaacccagaagctcacaaaactcctctatggaccacacggattcctgcatgagtatgtttcctcgaactgggaatacggtgctctgtacacagttctcgaattcgacatcctcgaaaagatcccgcttgatggagaggtccacgtatcagagctggctatgctgtccggcttacctgagaacaagcttctgcgtatattacggttggtcgcctgcgagcaaatcttggaagagacctccgaacaggtcttccgccatactgtgatatccgaggaattggtgaggaacaagaagatgaaggcatgggttggattccagttgtttgagacacgtgttgcaagcgcgcatttggccgactcactcaagcatcgcaacgactttcaaactgggtcgtcggctttcaaacacgcctggggagcttctatgtatgactggcacaaagcccatccggagaaattcgcccgttttaacctggcaatgcagggtgtcactcaatctctcgacccaggaaatggtcttttctgcgactggttcaatagcaacaagcgaaacaagcaccgcaacctggttgtatacattggcgctagagacgggcacgtctaccagtatctagcagagcaatatcccgacatctccgtcgaagtccaagacaattcggaacaactcctcacccaaggccaaaaatccctcccaccagacctccaaccccgaatcacctacaccaagcgcgagatcttcaccccgcaacccgccccctcctccccagacaaccaaaccctcgccttcatcctccgcaacgtcctctggaacctctctgactcggacgccatcaccctcctccgcaccttcatccccgttctcgaagcctcgccagaaaccgtcattctggtcaacgatatgttgtcacccgcccgcggcgaatttgacgcccagaccgagaaagcatatcgcagacgcgacatcacggtgatgacaatgcataatgcgaagcagaggacggagggggattggaggcagttgttcgaggcggtgagtccgcattttgtggttagggggtggacggcctttacgagtcatgcttataggggtctttgggagattaagtgggtgcttgcaaattaa

SEQ ID NO: 276 - DNA, 1020 bp, Endocarpon pusillum
atgcaattgacaactactcaataccaagccattggaaaaggggggcccttcgccgtcgtgtcagttcccaaacctaccccgggacacaatgaagtctctatccggatggaagcggttgctttgaatccgttagattggaagaaactgtactttggcgccatggtcgagagctggccgaccgtgttgggcatcgacggcgccgggattgtggaagctgttggagagggcatcactagatacaaaaccggggacgaggttttcagtctatttgggcatgagacgaaggctgcttctttccaggaggttgccgttgtgccagaacactacgttgctaagaagccgggaaacataagcttcgaggaggcagcatcactacccatctgttactgcaccgctggctccgccatctactacggcctacagatccctctcccgtttctcccagacggtacaactagcggcccacagccgaagtccatcctcgtccttggcggcagctctggtgttggtgcttccgcaatccagatattgcgccttgcgcttccctcggctaccatccttacgacgagctcctccaagcatcacgtctacctggaatctcttggcgcaacccaagcttttgaccagaagtctccatctttgatcgaggacatcaaatctgcaacaccagaaggcaagggcgtagaaatgatccttgatgcagttgccagcagtgcttcgcagaaggatatcttcgataccctcagtgcagatggaccgaaggagtactcggaagtgttcaccgggacaccgaccctggtaccggatggagtcaagagacacgttgtatatgggcggaagttattcgagacaccgggaggacaaaacgtgatgactgctttggcagacttggtaaggaaaggggactacaaaatccccattcaggtaaagaatgtgggaagcgggtttgaggctattggacctggattagaggaattgaaggctggtgtgagtgcgacaaaattggtggtcacaatttag

SEQ ID NO: 277 - DNA, 1551 bp, Talaromyces cellulolyticus
atggcgaatgatcaggctgttgtcgacgcattgcagatctactatccgaggttctatcagcacccaactgtgcagaaattgaaccaagctgttcttgatagggtgggaagcccggagaatacgcgatgtatggtttttccttccaaggacgcggcaaagagatgctgcgcgtacattcgcaagagaaaggggcctaatattatggttcatgatgtatccttctctcttactcaacacgtatcccaagcgaatcaaacttgggcccgcttcagtgctgttctgttttcccaggaggacaaagacgctgcgaatgagttctggggagagatgggggatggaatctccagtcgccacgcacaattttgcctggacagattccaattcatgagctcggtttcgttagtccccgatctacaaaccggtgaaaccggtagctatggcgaaacgattcctatggaaccgtggcaagattccgatgccgacgccaaaaaagacattacaacaattattgcaagacttgtcacgtcagatcaacctgggcaagaggcagtcaatccagatgatgtctaccttttccccaaaggcatgtgtgccattcgcagtgtggcaagtatacttgctccaggatcagcgaaggcttctgaggcagttgtgttcggatggccctacggatcgacacctaggtgtgttagggcgagtgagtatgagcgtttcacattcttttctcaaggtacatcagaagaattggaccagctggaagcgtcactagcatctggcaatcggatcgctagtctcttctgcgaagttccgtcgaatcctctatgcgcgacgccagacctccatcgcattcgtagtcttgcaaatcaatatcacttcgcagtggtatgtgatgagacaataggcacattcatcaatgtggatgtcctaccctatgttgacgtcgtcattactagcttaacgaaggctttcagcggggcttgcaatgttatgggaggaagcgcagttttgaacataaagtctccatggtatgatttgctgaagtcgaagctcaacgaactacatgaggatctcgtgtttcctttggacgcaaaggtccttctacacaactgtctcgactttccaacccgcatacgaaaaatgaataccaacgccctagcaattgccaacttgctcaaatcctgcgagtcaattttgcagctgaaccatccttcaatggtagccactcgatccctatatgaacaataccgtcgacccagtggcggatacggggccttacttagtctcgtctttagagaccctaacagtgcgattcgtttttacgacgctattgacctacccaagggcccgagtctcggcgccaactttacgctgatcttaccttattcccagttggcacacgcttatgaactcgactgggcggagtctcacgggatagccaagcacatcataagaatcagtgctggactggaagatgagtctatcctaatatcgaaggttgatcaagctctacaagaagccttgtctcttgaaggccatagaaccatagcataa

SEQ ID NO: 278 - DNA, 1851 bp, Talaromyces cellulolyticus
atgacccattcacagcttctttcaacagcggacggtggcccagcctcgccttcccctgccaacttttggcaattgctctctcttggtgcccgccatcaggcttcaagattggctcttgtatctcgtcatcaacccccgggacacctatctaatcttttcgcgccctctaaatcatctcccggttcgtcatccgccgatgttgggttccgatgctcctacgagcaacttgtcactgccgttgagaacttggcaaccattctttatgaaaagggtgtccgcgagagtgatgtagtggcttctttcattggcaacaattacgcagtcgagtggacccttcttctgttgacatgttggaggattggagccgtttttgctccagtagagccttccctgttggcgcgaacgaaagaactgaatgaggtttacaaactgttgaaaccaaaggtcgtggtcctcggtgacgggatagacacgaagtcttgggtggtgaacgacgtgggagagaagaacgcagtcatttggctcatttgcggtggaaacgccggagcctgcagcgaaaggtggtcatcactatcacacttgacctacccggcaaattcctcatcgtctcctccaccatccgtgtcgccacctacgaatccagctctgatcatgttcacatccggcacaaccagtacgccaaagggttgttgccttacgtttgccaatatccacgccgaaattgaggggcaccacgcattcgcatatagcagctggtcgcaggcggcgaggtttctggtgaccactagtctcttccgcccattgtgctatttgggttgtctaagttcgtggatcgcgggcggcagcgtcatctttacatcccctttttttgatccagcagcatcgatagagggcttgaaggcggagcgagggacgcatctcatgatactgccgacgcagcttcgcgctctagtaaccgaatttgtgcagcagaatcactcgctcgaacacgagatcttgttcatttccccagcgggtgatgtgtccgacaaggagctcattcgtagcgctcgacaagccttgaagccgcgtcggtttgttcctcattggggcgcttcagaaggttcgccaatgtttggcttctcagttgcagataacaccttggcctcgcttccgatgttggaaagcggcgatacgggcattggtcgcgcgttgccgggaaccaaagcaaagatttgttcggccaaggaatcatctcgaacgcctgtgcctaggggggtccgaggagaacttcacgtgtcttctcctgtgctgattcatagctatctcggcaatgtgtcaagttccagtttctatgaagacgcccaggggcgctggtttcgaaccggtgattgggcggtgatggatgatgacggggtggtatacgtagtcggaaggataaaagatacaatcaagtgcagagggattggacttttccctccggtaattgaagggtatataaaggattctttcggcgtccaggcaacagtcatcggtgtacctgatgtcgactacggagagatgcccgttgctgtgttgaaatcactgccatcaacaaccacagacaaagggcatagccatctcacaaaaacggagctgagctcttcaaatcatttcccatcaaacgcaagcgaatcagctgcacaagcgattatccatggcgtcttagcccatcttggctcggagtacattctaggcgcagtttatacacttgcgcaattagagcttgctgactggccgctcaatagctcagccaagctggataagaaagtgcttcgaggcgctgttgaaagaaaatgtaaacaagatgctgttcttcgagtttcatactga

SEQ ID NO: 279 - DNA, 660 bp, Talaromyces cellulolyticus
atgtctcatcctcctaacacttccgatttacgtgttcatcattttctccggcgcgcatacgctctgaatgagagctcggaagcggaaaatctgtatgatgaatgggccgacgtctatgatgcagataatgcgaatggctacgcttctccccggcgctgcgtggaggcgattgttaacaacctctcacctagctcctcggaagcactcaagatcttcgatgccggctgcggcactggtctggtgggcgactgtttggcccagtcaacccttgcgaacaaattcgttctagatggcgtggatcttagcgtgggcatgttaggagcggcgcgcaaaaagggcgtgtatcgggaacttgaaagggcgaatctgaacgagaagattgataaggctgatgggagttatgatgttgtaacttgtgtgggaaccttgaccaagggtcacgtcggacctgaggtgttaggagaacttgcccgtgtgactgtcatgggtggattgcttgttgctacagtgcataatgacatttgggaaagtggtggctacaaagcgaaagttgaaaagttacagtctgatgggattttgcagattgtgagcacggaagaatttgggattttggactggacagagacgggaggaaggatgttagtgttgaagaagacatga

SEQ ID NO: 280 - DNA, 1977 bp, Talaromyces cellulolyticus
atgtcgggttttattattgcaagagatgctgatgatcatgaagtccgatttcagtgcgattggcaagtcaataatgcaacgatacctgcagaaaaaggcacttcctggcaaaccatcgaccttaatttcaagcgtgcttcctactccggtgaattctcatggcctgggaggatagaagacgtacgccttttcattgaattggccagcgacgagctcctccccctcgataagcaaggtcttggatctgcggaagcattcgggttgatacatgactctctctcggcggccaataatgaagacggcagtatcgccagattagtagtgccacaggaccgcggattcatcgtacgatcggacatactttcacagcgcctactggattgcccgccggtgaaaaaggtcgtcgatttttccaagccgctgcagacttttagcggagaacctatcagtattgacagtattcaagcgcttccaccagctctcgtcgcatcggttggggccatactcttgaccactcccaattcagctcgctttccaacctccgagtcgctattaagtgcccttgatcttgaattgcacaaccggctgtcctttacctggctgtcaacagagacgctgacacgtcaaacccttgtcctcctcgatggtggtcttcgcagccctgattatgggggaacgggagaaagcatatacctggcggccgaagcgctggggatcgatatggttgttctcgattaccctgggcattggctgaacgagcctcgctatcgccactggtataaggaattcatcccgttcgataccccactccacccagacgccggctatgccagtcgaatcgttgagacggtgcgatcgttgtctggtcatgtcgacggtctagtgactttgcgcgaccaatacaaggtcgctgtcgccgaggctgcccgacagctagggctatacacggagcctccctcggcgctggagatttccgcgaacaaattcaaaaccagtgtctcggcaggacatgatgtgttccaggcttccagtgctcagcaagctgtcgagctggtacgggagcacaatctcgatttccccctgatcatcaagccgtgtaacggattcctctccgaaggcgtcttccgggccgagaacgtctccgacctcgagagcggcgtccgcggcatcaataccgatcgtcatggactggagttcgtcctggaaaagtattgcgacggaccggaagtcgatgcgaatcttgtcctctgcgacggcgagctgttgttttgtgaaatatccgatgattttcccaaaagcgctgatgcaaacggccaaggcagtgtgagaacattcattgaactggcaaatgtcctcccgtccaagctgcccgaatccgagctggccatcctgcgagactcgctgcaccacgacctccttcacatgggcttccagaatgggttttaccacgtggaagcgcgggtggaaaactcaagcatggagtatgccacccaaaacaatatcctcgacttggtcgagcgcaccactccagccaaagacaaacccccttcctcctggctgatcgaagtgaatgctcggccgccgggaatacaggaatcggaagccattcgatatacgtacggggtcgactattttggtcttgcgctgttgtttggtctcaatagtcggcagcgtgtcaagcaactgtcggtccccttcttgcaaggcccgcagtattggtgcgagatggtgttcatcccggttgacaagggcggagtctttcattccgcggatgtctgcaaggaactattcgacagacatcctgatcttgccttgcacgttttttgcttcttacatcacggcgacaccgtgccggatcctggaaccggagtcaatgcttgggtggcatactttaatgtgttctcgagagagagcagggcccatgtattagaaattgccgaccgtgtaagacaagaggtcaggttttccattgtatag

SEQ ID NO: 281 - DNA, 1833 bp, Talaromyces cellulolyticus
atgacggtgagaaacgcgcggaagagcagcggctctgctttaccaggttacaaggaagacctgtccaaagggccaatgctccgcttcgaagaatccctaccaaaactccccgtcccgtctctcgaagaaaccgcagcgaaatatctcaaatccgttcagccgctcctcacgagttccgaattagcatcaactaccaaggccgtccaagatttcatccggcccgacggcgtaggtcacaagcttcaggaaaagctgattgctcgccgcaatgatccaaagatcaggaattggttatacgactggtggaatgatgcggcataccttgctttccgagattcagtgatatattccagctacttctattcgcaccgcgatgaccgaaagaggcgtattccctccaagcgcgcggcagcaatttctaccgcggtgttggagttcaagaagcaagtcgatcaaggtaccctggagcccgagtacgcaaagacgcaacccatggctatggacagctaccaatggatgttcaatgtctctagagtacccgctagaccatcggattatcccgtcaaatactcttttactgagcacaagcacattcttgtcatacgcaagaatcagttcttcaaaatactgcacgaagttgatggaaagcagctgaatactgcggaactagaacagcaatttgaacgagtctacgcaaaggcagaaaagggacctgctgtcggggccttgactacggagcaccgcgatatctggacggacgcaagagaaattttactgagagcgcacccctcgaatgcaaaagccctgaaagaggtggagtccgcttcatttgttgtatgcttggacgacgcttcacctgtgacattggaagagagggcacaccagtattggcacggtgatggggcaaaccgttggtacgacaaacctgcgcaatttattatcaacgacaatggcactgctggttttatgggtgagcatgcgatgatggacggtacctcgaccctccggctgaatgaattcgtcaacaacgccgtctttaaaaacacactcgatttctcggcctcatccgtccgctcccacctcccagatcccacactcatccatttccacgttaccaaggaggtccaagccgagattgaacgggcccaaaaggacttcaatgaagtcattgacgcccatgaactgcaagtccaagcctaccaagcctatggcaaagggttgatcaagaagctcaaatgctctcccgatgcatacgtccaaatgattattcaactggcctacttcaaaatgtacggaaagaacagacctacgtatgagtccgtcatgactcgacgcttccagcaaggacgcacggaggcctgtcgatcggtctctgtcgaatctgtggctttctgcaaagccatggccgatgattctctcgatgcaagcgagaaggccgccttgtttcacaaagccttaaaagcacacgtggcctacgttgctcaagcgtccgttggtcagggggttgatcggcatttgtttggattaaaaaggctgctggacccttatgatgaggttccggccatttatcaggatcctgcatatgcctactctagcacatggttcatttctacctcgcaactcagctcggagttcctcaacggatttggctggagccaagtcgtcgatcctgggtttggaatcgcctatatgataaacgaaaacagcattaatttcaatattgtctccaagaagctgggaagcgacaggatgagcttctacctcaacgaggctgcaggggacattcgagatcttctactctccaccctcgagcctgccaaggccaagttataa

SEQ ID NO: 282 - DNA, 1464 bp, Talaromyces cellulolyticus
atggtttccgatactcaaacccagacgggaaccagcccatcagagaaaaaggagattaacggcaccaatggccagctagatcttgaggcatcccacgttctgcacaactcgctcatctccatccctccgacggtggtatctgctgagggttcctatgtgactttcggtactggtcggcgtgtccttgatgggtgtactggtgcggccgtcgccatcatcgggcatggcaaccctgaggtgctggctgctgttcaggagcagatgtccaaggtgtcctacacgcacaccgtggcattcacaacccccgtcgccgaagccttagcgaacgaaattcttcagggaaacccacatgggctctctcgagcgttctttgtctcatccggcagcgaggctatggattccgctctcaagctcgcaagacagtactacgttgagatcggccaaccgcagcgaacccgactcgtgtcccggcagcgcgcataccatggcaacacagtcggcgcgctgagtgtgtcgagccatgtgtcaagacgggcgcctttcctggatgcgttggtcttgaataacgtgagctacgtgagcgcaacctatgcctaccgcgggcaactcgagggagaatccgaggaagagtacagcgcgaggcttgtccaggagcttgatgaacagttccagtctgtcgggcctgaaacggtcatcgccttcgtggcggagcctgtaggaggcgccacagcgggatgcatcacggccccaaagggctactaccaaggtgtccgccggctgtgtgacaggtacggcatcctgctcatcctcgacgaagtcatgtgcggtagtggccggacgggcacgtatttcgcgtttgagcaggagggcccgggcgtgtatccggacctgctcaccatgggtaaggggctgggaggaggatacgcccccatgggagccgtgttggcgcacgaaaaggtgatccgcgggctgcagagtggcagctcctactttgttcattcgcatacctatcaggcccatgccgtgggttgtgccgccgccctagccgtgcagaaagtgcttcgccgggatggccttgtcgctcgctgtgcggccaaggggcgatggttcgaggcggccctgaatgcaacaataggccagcgcaagtatgtcgggaatatccgcgggaggggcctgttctggggaatcgaatttgtccagaatcgggccactaaggagccctttccgccagcccttcgctttacgtggaagctggttgatgaggctttccgccgccacctgtcaatttatcccggggcgggcacagcggacggtttcaagggggaccatgtcatacttgcgcctccttataatgcatcagacgacgagtttgaggatcttgtgagactgttgaacgaggcctacgacgcagttgagacagaggtagacttggctcttgtggagggcaagcgtgacggcgagtaa

SEQ ID NO: 283 - DNA, 3576 bp, Talaromyces cellulolyticus
atggtattccaaaacttcaagcaaactcattctgaatgggtagagctgcagcagctcttggagtctgataagcctgtcatcattgatgggcaaagcctcaccatcaccggtgttgtggctgtagcattgtatggaaaacatgtagctgtgacagacgacccagctatcctcgaccgtgtccagcagagtgttaacattctcgactctgagctgaaaaacggtcacactgtttatggcgtgaccacaggctttggtggcagcgctgacactcgcaccagcagagtcgaaagccttcaagttgccctacagcagcatctgaatgtgggtatccttctgccgtcagacaagggcctgtactccgatacacccgtccagccagaaggtcttcaatcccatgctctgccagtgtcatttgtcaaagggatgatgattgttcgttgtaactctcttatccgcggccactctggtgtccgcctcactctgatccagaacatccttactcttctggagaaaggaatgactccagttgtgccgctacgtggcagtatttcttcatctggggatctctctactctctcctacatcgctggtatgcttgaaggtaacccggatgttttcgttcgtatcgggaacgaaaattcctccatctacctccccgccgacagggcccttcagctggcggggatccaacctatcactctacaggcaaaggaaggacttggaataaccaacggcacctctcctagctgtgctgctggttgcatcgcaatctaccaggcccagcaacttgcgcttcttacgcagctgcttactgctatgggaaccgaggcccttttaggcactgcacacaactaccatccgttcatttcagccactcggccccatcaaggccaaactgaggctgcggccaacattagtctcctgctttctgggtccaaactagcacccaacaaaaaccctgaaactatcggtctggctcaggaccgttacgccctgagaacagctcctcagtggattggaccccagcttgaagatctttgcctcgcctatcgccaagtccaggcggaagtgaactccaccacggacaatcccttgatcgatgtgcagaccggggcaattcaccatggtggtaatttccaggctgtctgtataacttccgcaatggaaaagactctgtcggcactgcaaatgctagggaagctgctgttcgctcaaagttcggagcttgtccataataaattcaacaagggactgcctcccaacctttcaagcgatgatcctagtctttcgttcacagcaaaaggctttgatgtcaatatggctgcgtacatgtcggaactcgcttacattgcacacccagtcagctcacacatacaatcggcggagatgcacaaccagtctgtcaactctcttgctctaatatctgcacgctacgccatggaagcagtagaactcgtctcactcatgtctggaacgttcatctatcttctttgccaggctcttgacctgcgatgcctacatttggaattcgtcaaggccgcggagccggccatccgtcaacttctcaagacccagtttggaaatctgatggcagacaaattgtttgacgattttgccgagcagtcctggaaggctttacttgatagatgggaaagcctgtctcacttagacctagaagatcgtgtctctgcgactattaaagagtccctaggagatatagtccattccttcatccacgacaccaatgtggaggatggttctgccgggtctcaatttttgctcgccatcgagcagtatcagagaagagcgggcacgacgctgagaaccctctacgaccgcactcgccaggagttctacaagaaccagaccacagcggactatttgagcccctcatccgccaagttgtatacctttattcggaaggaccttcaagttccgtttcaccgcggattgattgatcacccgagtacatctgcggcgattgatagcgaaagtgggcccggaaagattctgggcacacttgcgaaaatgccgattgttatggaagctccagacggactcacgtctagggaatcggccaaagcctcccccaaatatgaaccaaggctcctgccgatcactatagatgccatcgctcaaagtgatccaagtcgggtgcttgcagagttcctagaggctcctcatcactcggaggagacgtttgagttgacctttgggctttttgcccgggtaatcgatagactgtcctggtggatgagcgcgatcggcaagcaagccgaattgaagacttttgatacgattgctttggctggtttcctggactttcgtcactatgctatgctgatcctcttctgctccttagtcactgatacttctgctatggaacggctattccaagatgcagatgtcaagatctttttcaccacagtagagaaagagtctcctccggtgcaacgggcttaccctttgccaacaatcctgctccctagtgtagaggaattgataagccctggagaggtgccacgatttccttactcaaagacatatgcccaagctgctcgggatccaatcattgatttccaaagtccagggtctggttcaacagccatgcggccgcaatggacgtggaccagaacatacgccctttccgcagacgagatgtgtctgaccatcacaagccttatgcttgctggcattggggctgcagtgtttctggacgttgtcgtcgtcttccttcctttccacgtaagtggctatagcggggatcgcgctgcgtcctggcttaaaaaggctcgttgcgatgatgcgattgtgtttccaagctttctgtcactggcggtggatagtccagcactgcttgagcagctcgtcatgctgcgaaaaatattctggatcggcgctcccttgacctgggacattgctcgcctgctcgttgaccggactcatttggcgacgttatggggcacaactgaaactggctatttagtcagctttgagaccgaccccgaggactggaattatctgaatattgattcggagagagaggggatccagtgggcagaagtcaccccaaaccggttcgagatgcggttcatcaagcacgaagcacccgcggagccacaagtggcgtttttgacactgcccgatgctgatgttgttccatccggcggtctcttctcaccgcaccctaccaagcccgatcactggaagtatgcaggacggccagacaatattatagtggtcaaggacatgctgttcgacccagcaggaatagaaaaggagattgagagccttgactcagtcaagggggcgttcgtgttcgatatcaagtgtgcggtggtctgcctcatcctggagctgtacgaaactccacaggacactcagagtgcattcgaagcagtatggccgacaatccagaaagcttgcgatgggatgcccgagcaccaggtcattcagccatcccgagtcattctagcacgatcggagaagccggttcccaggaaccataagggagaagtcaaaagaccagctttggcggacttatatgaagctgaaatgagcgcttgctatagatag

SEQ ID NO: 284 - DNA, 6978 bp, Talaromyces cellulolyticus
atgatgcagcgacatcctaccgccgaggccacaaccgcgggtggctgcgtgcatcacctctttgaacatgctgttaagggctacccagacaacattgctctgatcggtggcacgcatgagctatccttccagcagcttaacacgctcgctaaccattttgccagtgctctggtcaggcgaggagtagggcgcggcgatctggtcgctatagcgctggatcgatctgtggatctggtcgtcgccttgttaggagtccttaagtcgggggcggcatacgtgcccgtagatatgggtttccctattcggcggatcaggcagatgatggatgatgcgggcccgaagtttgttatatgtcgagatagtacactggatgcactgtcatcctggagagatatatgcctgagtgttgatgacatacgaaacaacaacggcgagaaccactccttgtccggccctgatggaggcaacttggacctggacgtgtgcgccgaggatctcgcatatatcatctatacatcaggttcgactggaaagcccaagggcgtagaaatcagccatggagcggtctcaaatcttctctcgtcgatgcgacgtgaaccgggatgcgaccaaacggatcgactactagccataacaaccatttctttcgatatagccgttctagagctttttctgccactcgtctgcggcgcaaagacggtcattgcccaggcgcatcaagtccgcgacgcgggagctctaatcaaattattgaaacaccacgcaatcaccatgatgcaaggaaccccagccacctggcaattgttgctggattcgggctggcaaggcaacccccggttaggaaaagttttatgtggtggcgaggcgctttctcgtcgactggccgacaggctgctttcttgcgccgactcggtatggaacatgtacgggccaaccgaagccactgtgtgggcgagtgtttggcgggtgggccttggtggtgatgtgctcattgggaggccaatagataacatgcaattctacatactcggcgaaggcctatcgccagtgccgcaagggagtcctggtgagctgtacattggaggtgctggcgtcgcccgcggctatcatcgcaaccctgagcttactcgatctcgcttcatcgagagccctcgtcatggcggcattctgtaccaaacaggggacttagcccgttgtctggcgcccgacgagctcgtggtgctgggccgggtggatgaccaggtaaagatccggggccatcggattgagctaggcgatatcgaagcggcacttgctgcccacgaggatgtctccaaggccgtggtcgtcagtcgtgccgaccaactggtcgcctactgtgtccggaaactgcctcaggtcactgatgaggaccaggcccgcagcctggcagagtggactgccacgtgggaccatgcgtacgaaaccacagatcaagacgccgtgagccaggatgccatcctcaacctggccgggtggaggaatagctacgacggcctcccgttcagcaccaatgaaatgcgtgactggcagtcaagttccgtcagacgcatcttgtcctacggcccggaacgagtcatggagattggctcgggcaccgggatgatgcttttcagtatcgcaccgcactctagtatctactacgctatcgattcttcgagaaaagcagtcgagtttgtgcgccgtcacctggggttgttgccccatgtcacctgcgagcatcgtgaagctcacgcactgcccgtgatagagcaggagttcgacacggtcatcgtcaattctgtcatccagtatttccccagtatcgactatctagtcttgttcctcgaatgggcggttcaggcagtcggcaaaggccgtatatatcttggcgacgtgcgcaacctggcgctgctaaacgtcttccatggcgatatattgcattcccgcataaagggccaaatccccgccgttgacttagctagccgggccgcagaggcggcaaaagccgatcgtgaattggtactttcccctgatttcttcgcctctttggccaatgtcttcccgcggatatctcatgttgatatcacgttgcgcgatggtgattacgataatgaaatgaccctctatcgctttgatgtcaccttgcatattggagagcgtgacgagattggtacgaggccgagagaggtggattggcggactaaggtcgatttgtccgctctaaaggatgagctaatggatgctgcgaaaggcaacaatatgctgcgtttaaacaatgtccctaatgggaggctgcgtaatgtccacagtcgactcgggactattctcggctacccgtcatacgatagctcgtcctgggtccatccgcgtattctccatgctgtcgctcgagatgttggtatgcagtcggcacttttgcccagccggtcaaacgatgtttggagtttcgacgcggtgttttggcgggctggccagaccccagatctcacactgcaaccctccaaagcaatggacaagagcgcatgggctgaatacgcgaatgtacctaacatcggaaaagcgatcagtccggctaccctcgacagagtgctccgaccatggctagcagaccggttaccgacatatatgatgccatcgtttttcgtggtactcgacgccttgccactgacacccaatggcaagatcgaccgcaagaggctaccagatccattagtaagagacagggcaattcaaaagccagccacgcaactagaggccgatatactggccgtttggtcgcgggtgctgggccagaatggtatcgatgtcaaagataacttcttccaggtcggaggggactcgttacgtgtgactagggtgcaaaccgagttggagcaattgctcaggcggccgatcttgctcgccaaactattcgaacattacaccgtcaagacactcgcggcatacttagctgaagatatgagcaatgatgtgaaaacagacccgaaagaccatgtttctgttagccacaatgacgaagacattgctgtagtatctatggcatgccggctccctggtggagtcaccacccctgaagagttttggaagctgcttgaaagcggaggtgatgcaatcagcgaagtacccaaggctcggtgggatgcagaggctatctataatgcggatccagacgcaaagggaacatcgtactgtcgtcaaggtgggtttctcgacaccccgattgactgctatgatacagggttttttggaatttcgccccgggaagcacggtcgttggatccaatgcaatacatgatgttagagacgtgctgggaatcgtttgagcgagctgggtatacaagcgaacagctccgtggcagccagacaggagtatacgtaggggtcagtaatattccggcatactcaaaccctaacggcagcggaaaagctctagaagacctagacggatatgcagggacggggtcggctgccgcgaccatgtctgggcgtgtttcgtacacgtttgggctcgaaggtccgagcatgacggtggacacggcgtgctcatcttcgttagtcacgacccatctagcatgtactgccttgcgccaaggtgagtgtgacatggcagtgtctgctggggttagtctgatgctctcgccgggggtgcatgttgaatttagtcgactcaggggaatggcgagagacggacgatgtcgagctttcgcggccgacactgaaggcacaggatggagcgaggggtctgtggtaatggttctcaagcgcctatctgacgcccagcgagatggtgatcgcatcctggcggtggtgcgtggctcagcagttaatcatggcggacgcagcagcgcctccctcacgacgccgagcggaccggctcagaaacggctcattcggactgcgctggccgcgtctaggttgcaggcgagcgacatcgattacatagaagctcatgggacaggcactaagcttggagaccccatcgaaggggtggcactggcagaggttttcaaggacggtacccgtgaggagccgttgtgggttgggtcagccaagtccaacatcggtcatacccaagcagccgcgggtttggctgggatgttgaaggtggtgctggccatgcagcacgccattctaccgcagacgttgcatgtatcgaacaacccgacgccagcagtggagtgggagagagcaaacatggcactggtgcaggagaagcggtcgtggcggcgacgaaccgcgcggcgaaaggcaggtatcagcgcctttggtatcggtggcaccaatgcccatgtaatccttgaggagtggccgtcgcttgcaccagcggtggccaatcttgatcctcgttgtgatcctcacggtaaagatggtggtattgctacacctcctttgaaaccgctgctgctcctgtcgggccacagcaatgctgcgctgcgagcacaggccaaaaaacttttatcccatttgactaataacagtacggcgcattattctctgtacgatgtggcctactcactggcaactacacgcaatcatttccgaagacgaaaggtgctgattgcgcaggataagagggatctggcaagccagctggcaaccattgctgccgcagagtccactaacgcgccagcagaggatatggtgcagccatccagaggccaggtggccatgatattctccggtcagggtagccaatttctggatatgggcagagatcttgcacaacacttccctgtttttcgcgacgccttggaggagattactgcgcactttcatggatatttagagcggccactgttggatgtcatgtggagtggtgatgctgacagcaggaatgatgccctgctgcaaaggactgactacgcccaacccgccctgttttctttagaggtggcgctgtggcgtctgtggaccagctggggcgtgaggccagacgtgctgctaggccacagcattggtgaactggcagtagctcacgtcgccggcgtgctaaacctgagtgatgctgcccgtttggttgctgctcgtggtcggttgatgcaggcagtagatactcctggggagatggtatcgctagaagccagtgcttccgaagtgtctgcagccattgacggtttagggcttggtatgaaggtcgatattgcctgtcacaatgccccctcacaaaccgtcgcctctggtgatatagatgccgtcaaagggctacgcacccactttgccactcggggccgtaaattccattctctaagcgtctcccatgccttccattctcaccatatggaggcaatactggcggattaccgcgccgtagcagagacagttgatttcagccctcctaatatacccatcgtcagcagtctaacgggtcagagagtggctcctggccagctagagcagcctgcatactgggtacagcaggcgcgcaacgctgtccgtttcagtgatggaatacaaacccttctgatggatcacgatatcaatatcttcttggaggtagggccgcaaacggttttgtgcggcatgggtgccgcctgtgtcgatgatattcgccattccaccattgcgcctacctggttgccgtcaattattcgggaccgggacgctagctccgttattcaacagagtcttgccgaaatacacattcaacatgtgtctatcgattggtcggcttactttaaagctgccagctgtcaacgtgtcgacctgccgacctacgcttttcaacgggagcctgtgtacactataaacagggacctcaaattcaagcgtagccccacttctaaccaggtgactagcgtcgcaacagctgctgctcttcatggaacagatcctctcgatgggctgcgcagctccttgatcgtggctgctccggcagagcaactgagaatcgtattatccatgattcgagaaactgtggccaagatcttggaccatttgtcgcccgacgatgtcgacctcgacctccccttgcaagacctgggaattgattcactcactgcattgctgatgcggaaccagcttacagcgcagactggtttgaatttcccggctatggtgacactgcatcatcccaacttaagaagtctgggtcagttcctcttacaccaggcattacaggaaacgtcgtcagcttcatcacctagcagcccaaaatcttctatagcaacacctgcttcctcaggttcaccacagttgtcaccgacagcggcacaagcgatcaatggtcattctgaaccgttgcagcacaccaaaatgccttctatcgccccccttcatcgcgtcttctcccctctattgggcttgaatcctccaaatacgcctccacacctgttctcgtctgccatgagctacttcagcaattttgattggtgctcccgccttatttacgattcctcgcctacctcatcatctagtgtgctaccaggttacggacaggctattccctttatcccacaatgcttcaatcccgctagtccgcggcatgatcaatttatcggcaactggctttcaaaccacaagaaaacgatcggtagcgacaatgatacaaaacaaagtcctcctcttcgccacatgctctccctcttccgaccccgcgacccttatcacattgaagatcccttgcgccatatccctcgtgttgcttccctgtttgctctaggggagggaacgtcgggatacgagggcgttatacatgggggctttacagctacccttctcgatgagagcatcagcatagttcatgagatcaataccgcgctaggcaagacgggcaaagtcttcgccgccatcaatgtcacggcttctctcagcgtcaagttctttgctccggtagccgcgaccgaagaagtagtatgtgtgacagcgtggatagaaggcatacaagggaacaatacaacaatgaaggcggagctcacagatctcgcaggaaataagctagctgaagcagagagcgtgtttgttgccgtgaatcaaaagtga

SEQ ID NO: 285 - DNA, 3819 bp, Talaromyces cellulolyticus
atggcggacctcaaagtgcagagccgggaagccgacgaaaaacaggcaagcatcctggaccggcaattgaatggggtttccgggaccgggcagctcaagcagacctcgctgctcgcctacgcaacgacggtcgacctcatatttatcggtctcagctgtttgtctgctatcattgctggtgctctaaacccacttctcacggttatatatggacaatttgccggtaccttcgacgactttgccaacggctccgttacctccaaggaagcaacgtcgaagacggccgaattcactcttttttttgtctatctcgccattgggcaatttgttttcacgtatcttaccaccatcggcttctattacactggagagcatatcacccgtcgtttgaggaaggcatactttgaatccatcattcgacaaaacatagcgttcttcgacacaacaggtgccgggtcaattacatcacgcctgacaacagacatgaacatgatccaggagggtctaactgggaagctttccttgtgcctcagctcggcggcgacatttgggtccgcgtttgtcattgcatttgtcgtgtactggaagcttggcctcattctgtcgtccaccatcgtggcaatgaccatctcaagcaccatcggtggtgcctacgctgtcaagtacacgaagctatcgctctcgtcttccaccaaaggagccactatagcagaggaagcgatcagctccatccgccatgttacggcgtccgggatccaaaaacagctctcggaccgttatgtgccatccatattgagcgcgaggaaggaaggcatgaaggcgcggtcatctgttgcagttgtggtggcggtcttgaactcggtgccctacctgagctatgctctctccttttggatgggctcccgatttctggtcaacggctctatgaatgtttccgaaatcgtgaccatgaccctagccatcgtcattggcgcttggtcggtcggaagagtcgctcccaacgcacaagcgtttatctcgtgtatagcaagcgcaagcggcattcttaaagccatctctcgtacatcgcccctggatccttttggcgtgggtggggtggatgtcgacacgataaatggagatgttacctttgcaaatgtcgggcttgtgtacccttcccgacccgacgcgactgttttgaaggatttgagttttacgatacccctccaccaaaccacggcggtcgtaggagcatcggggtcggggaagagtagtatagtggaactgttgatgcgtttctacgagcctacgagaggccagatcttgtttgccggacatgacattcaatcaatcaacctacggtcccttcgtcgccagatctccctggtcgggcaagagcccatgcttttcaacacctcgatatttgagaatattcgttacggtcttgaaagtactgcagatgacttgagtcctgaggagactgagtccagagttattcaggcagcgaagagtgccaacgcccatggattcatatcggggcttccgttaggctacaaaacaccagtcggagaaaagggtcttcagctctccggtgggcaacgacagcgcatcgcaattgctagaggcctcatcaaaaacccaaagttgcttcttcttgatgaggccacgtctgcccttgatgtccattcggagcgagcagtccaaagtgcgctcgagaaggcagcccaaggccgcactacagtgatcattgctcaccggttgtctactattcgacatgcagataacatcattgttctagcgagcggtaacatagcagaacaaggaagtcacgaggagctgatgtcgaagaaagcatattactttcgcctcgtggaggatcagcggttattgaacacgaatgaagaagaaaagtatgttggagcgcgttcccatgaagatgacctagtagaagatacgaatgacacgctcgaggtgtctggtgtggtggaagtgaaatcagagaacacagtgacccccgacgtgacactgagagcagctagcccggccccgggtgcactgtcgtttcttgcgacccaaaagtttctcgctacaataaattcgcctagtcttgccctcctggcctttggccttgtgctttcagtaatttccggtctgggaactcctggtcagtcgatcatatttgcaaagcttatcgacgtcttgtcattacctgccagcgcctacagcaccttacggcaccgggttgacttttgggccctcatgtacctagtactcggggtggtcatactagtgatttggatatgccaaggggtcgtcctggcgtactgcgaggaaagcgctattttccgtgctaagcgccatacctttcgaagtattcttcgccaggaggttttgtttttcgaccaacgcaatcactctacaggacagttgatgtcctttctctcttccagcaccactgaccttgggggcgtcggcgggttggttcttggcactattctctcgttttgcggcaccatcggaggtggtctcatcctctccttgatcatcggttggaagttagcgctcgtgtgtacatcgaccatcccgcttgttgccggttgtggctatctacgactgatgatgctgtctctatttgatcagaaagttaaggaatcgcacaacgtgtcgatcaattatgcgagcgaggcaacgactgctatccggacagtagcttcgctttgtctcgaagaccaaattcttgtgaattacaacaggatgctgtctgagcaagccgccaagtctttgatatcaatacttcagacatctgctctatatgctgcctctcaatccatcacttttctttgtgctggcctagcattctggtatggtggaaccctggttattgatcatcagtactcaatctttcagttcttcgtctgctttgcctccttgatctccgggtctcaaacggccggtatcatcttctcccatgcacctggattcagcaaggcaatgacggcagctggagaactcaaagccctcttcgatataaaaccgaaaatagacacctgggaggcgagtggccacccagttccgaggggaaaatccgagtctcgtattaagtttgaaaatgttacttttcggtatcctgaacggccggatcgcgttgtcctgaaaaatttcaacctatcgatacgagcgggacagtacgttgcgcttgtcggacccagtgggtgtggcaagactactatcgttggactacttgaacggttttttgatccaaccgagggtcagatcaccctggacggacaggacatcacgcagctcaatgtcaatgattaccgacgaatgctctcacttgttggacaggagactacgctgtattcaggcactatcaaggaaaatctcgtgcttggcgccccagaagacatctccgaagataccatcatctcagcttgtaagaaagcaaacatatacaatttcatcgtatctcttccggatggattctcgaccgaagtcggtgcacgtggtaccatgctgagtggcggtcagcgacagcgcatcgccattgcgcgagcgctcctccgaaacactaacattctgcttcttgatgaggcgacatcttcattagattcggaatccgagaagctggtgcaggaggcattggatgtcgctgttcaacgtcgtactaccatcgccgttgcgcaccggctttcaactatccggaatgcagatctcatctgtgtgctggaccacggagtcctggtcgaatcgggaacccatagccaacttatagcgaaaagaggcgtatatttccagatggtgcagacgcagaacttggagaagactaagacgagataa

SEQ ID NO: 286 - DNA, 8220 bp, Moniliophthora roreri
atggtttcaaccccaactgccactggcttccgtcctggctatgatcacatcgatactcacgctatggccatcatcggtgtttctgtcgccgcccctggtggcgttgacgacggacttgactgtgatgagttctatgagttcctgaaggtccgtggttctggtatcattaccgtgccaaaggaccgttggaacgccgaggcataccgtgctactgagccaggtcaaccaggcaagattgccgctactaagggcggctatatacccaatttcaccatcggcgaccctcaagagtttggtattaccccggctgaatcagcccagatgtcttgctcccagattgccatgcttcaccaggccttcaacgcccttcagcgtagcggcgttgacttcagaggtactaatactggcgtctacgtcggatgcgccggcggaggtgctccctttgacatggatattactgaggctggagcgtactacatgacaggtacttctctcgcaatcaacgctaatcgtatcagctatgtcttcgacatgaccggaccgtccttgcctgttgacacggcttgctcttctagtcttaccgccatgcatctcgccgttcaggccattaggaacggcgagtgtgaccaggccgtcgtcgctggtgtcaacatcatcatgagtccgctcgagacttcttcctttagcagactcggagttcttagtccagatggtatgtctaagtctttcgatgaagatgccaacggctatgctcgtggtgacattgttggcgctctcgttatcaaacgtcacgatctcgccgtcagagatcatgatcgtatcttggctacacttgtcggaagcgctcttacttcctgtggttctcttatgggctctttgaccactcccagccctgatgctcaagcagcggccatccgaaacgcttactctgacgctggtttagttcccaaccaagccgatttcgtcgagctgcacggtaccggaaccatagttggagatcagttcgaagccaacgctgcgggcgcctgcttctcggatggtcgtggtgacagagaggtcgtcattggttccgtcaagagtaatatcggtcacggtgagatgggcgcatacatcagttcgattgttaaggcaggctcggttgtcatgatgttggagcgcaagcagattctcccgaatggatacttcaaaaagccttcttcgaagatccagtttgacaagtacaaactgcgggtacctattaaagtcgaaaactttgttccctacgacgccgagcaaggtcttattgcgtcgatttcttccttcggatttggaggatcttgtggtcacactgtcctgcgagaacacgatgttaggcccgtcctccctgactatgaaactctaaactcgggaccatatctcttcgccgttggaggtctcactcctcgtgcagtcaacattctcgtcgagagctacaaagccgagtacgcggatgtcgaccctctatccctatctgaacacctcggctctcgtgctcgccaattgagctggcgttcattcgcagttgcagattccttgggccaggcaaagttcactgaacctgtcatggtctcaaaacgtgctgttcctctgatcttttgcttctctggtcaaggccctcagcactggcaacagggtcgtgaactcttctcccgatactctgttttccgtgaaagtatcttggcttccgacaaaatttacaccgagtacacaggaaagtccttccttgaaacctccggcctctttgtccccaaccctcctgcgaactctatcctcgccaaatcgctcttttcgaccttttcgatctaccttggtctcaagcccgacgccatcgttggacacagtatcggcgaaactgctgttctttatgccagtggtgctatgcctcgcgagatggtcgtcaagatcgccgttgctcgaggtgctgctcttcgcctcgttgacaacattggtggagccatggtcgctgtctctggttgcgaccttcgaacagtccaagattatgccgaagcagtcgttgacctttccaataacccgacgacgggtgttaccgactctctccacgtggcggctcggaatagcccgaccgactttggtctctcgggtgctgagtatctcgtcgacgaactggccaagtatatcgaccaatgggtttctggggtctctgctcgcaagcttcgtgtcagcactgctgttcactctccttatgtcgatgcttgcgagacccaataccgtcaagagctcgctgcaatctttgaagcacaccctggtacccacaagccttcgcttccagtgatgtcgacagtcacagccgaattcgttgagaaggagtacacgatcgactacctctggaacaaccttcgtcaacctgttcgcttctctgatgctattcccaagctcatcgagaagtacggcgaaaacacgaccttcgttgagattgctcctcatcccgtcttgtctcaatacattaaacgaatgggtgccttcgaatcagtcgcgggtagcaaacgtcctccttcggctcgtcacatcaaagctggtcaacgccctcccaccgaacttgatgcactgtacgaagggattggtcagctgtcggttgcaggtgtcaactcgatcaactttgcactcctcaacggctgtcctccagagaagctcctcggtccgaaataccccttccaatcgaagtactttaccattgcgcctcgcgttcccagctacctccacaaattgctgcctcctgaaaggcctctcaacagcgagcggttacgtgtaagcccgagtcttccggaaacttggatggctgaccatgtcatcgatcaatcgaacctcattcctgctgccgcatacatcgaaatggccctcgagttccccgacgttacatcagtctgggattgtcggttcgagtcggcatttattctagatggatccgtgcctgcagctactctcaaggttgctcgtgatggcaacaggtggagcgtgaagtcgtctacagctctccagagtatgcaaggagatctcaactggactcgctctgaaccacccttcgattcccttcacgcttacggcaagcttgactacggtcagccagagatcagcccgggaggtatcacacacgtcgacgtcgacgctgtccttgctcgttctcggtcaacacatcttcatgaggctgtttacgatgagttggagggtgtcgcacagtttggaaccgagttccgccgaattcagaagattgctgttaacgacactgaagccattgtttggatcaaaggtcatggcaatactctcactcgtaccggctatacgttccatcccgccctgatggatgccgtcttccagtccggtatcagttggaacttgctgtacgatcatgtgaatgttggcaacaaagagcggaccttcatgttacctcactctctccgtcgtggcttccgcaacaatgggactaccgaccctgttatttttgatgatgacttccgagtctacgctgtcctcgcttactggtctccgtactcgtggactttggactgctacgtgctcgatgataacaatgacgttgtattcaccttcgaaggtctccactttgagatggtacagcaagatgatgctaccgtcaatgagcatttcagcatgatttggcagcctcgtgctctccctgaatcccatcttcacggtgatgtcaccctcgcagatgaattctctgccgaggtcgcagaacttctagaagtactggacaagctggctttgggttacacaaaaaaggcgttgagccgccttcctcaagatttccagcccactcttccggatcgcaagcggtatgtatcatgggcagcccaacgcacgtcgggctatgcactcgagtccacgatggccattgacgatgtttcacccgcaatgaaggagaaatatgcctccctttttgaactcactcagcgtgttggagaaggccagacagacattctcgtcaactccaaagctgccgttgacatcctgttccgtgacgatctcatgagccgtatttatgagcatcctcctttcattggaagcgtcttcgatgagactgtcgagcagtttgtgaagctcgttcgaactgcacaagcggctggtaaacgggtcattcgtgtattggaggttggtgctggtactggtcgattcacagctatgcttggccaagctttgctggacgcgaggcttgagctctgctatgtggactacgtctgtacagatatctcaatttcgcttgctcaagaagctactgccaagtcaccatgggccactatcgttccggtcacatttgatctcaataagcctattgaacaacaaggtattgatccggcaagcttcgacattgttgttgctttcgacgttctgcatgcaaccccgagcatcacctccacactctcgacccttcatgatttgcttctacctggcggccacctcgccatcattgaattggatggaagatcctttgcaactggcgctgttggaagtgtttggatggattacatcttcggttcattccaggaatggtttggcgttctagagcatcgtcctgcttctcattgttctttggacaagtccgagtggaacgtcgctctaaagacctcaggcttctctgatggcctcttcttgacaacatctggcaccacagtgtcgcacatggcattcttctcgcaaactgcggagatggcagtttgcaaacccagctcccccgcaatttccaccccatcacttcagagtgatagcggctcctcccctactgttgccacaccttatcttcctacatatggcttgcaggatgatcatctacaaggcatactcaccatcattgataagtactcgttgttgaaatcgctctggctgattcctctgctgcttcttctccaaagaagcaagcacaggacggaggatccagcagttgagaaacagaagccgcaaattgttctacctaccctagaggaagtccaatccctcacccttccgccgaacactgtcactcaccgcttcaccgcaggtggagaagttgaattggtcaacttggtcgctggacttgattcatccacgccgctcaaggtttggttatacaccgacaccaaagccaccaatgcaacactcattggcctgactcgatcactccgtcacgagtttgacctctggaagatctacttgatccttttccacccatcttggaccccagttaaacaagaggagttcgttcggaaggagctcattcctctccgatgggttgatgccgaagtgatggtcgaggaagatggtgccatgcgagtgccacgtgttgttgccggtcccttaccgccttctaccgaaaccgtcggctctaaacccttacacttcgatggcactcggttctggcgcactttccccaaaaccttggatgcagacgaagttcaagtcgccgtatctttcattgccctctcgagtgtgattccaggacactctgagttctctgggaaggtcgtccatgttggcgctaacgtcgacgagtcgttaactgggaagcgggtcatgggagtgacctccacccccaagggcaacttcatcatatgtcccaagggttccgtaacggtcatccccgacagcatgagtcttccgtcctctgctgctcttgttggtcggttggcgttcatctcctcggtcgtaatgaaaattttggcttctgcgaagtccagctctcacgtcatcctccatgccgctgaatcctcgcctgccgctctggctacccttgcctacctccaagagcaaggtttcaacatctttgtcacaatctccggtccctcggcacctatccctcacaaagacgttttcgaatcaggtaacgtgcaagcgtggtctcatgctgtccagagatgggcaccagagggtgccgatttcgtcttcaacttcgaagatggaaatgacatccttgaagagtccatcgagcggctttctgcttggggaaccattgtgcagatcggcggtatctacccttgtcatctccgtcctggtcaacatttcgtttctgttgggtatgaccgactcttctctggagcacagaacattttggaagaggctatccgaaccactccacgccacatcatgtcccgtctttcgccaccttttatcattgtgcaagctgatgcgttagagcttgcccattccaaggcggcgccttacagggatatgactgtccttctcaattttgaagcgttacccgagaacacgacggttctgcgacccggtagaatcaagggctcgaacgcgttcaacccatgtgccgcttatgtcattattggtggaatcggtggtcttggggtcaacattgcaaggctgttggttgaatctggggcacaacatgtcgttttgacctcgcgttcaggagagaaggcattcgagaatggcaagcttcttcgcgagaagaaaattatcaattacttgcgcgaaaccggtgctaaggttgacgtcgtcgcagtggactgtcttgacgaatcgaagactaaggctctattctccaacctaccgaatgtcgccggtgtcttctacgttgccgtgagactcaatgacgctcttttcctaaacctcactaccgaggaagactggctgaaagtgtatgatgtcaaagtcaagggcttgcgtattctcctagatgccgtcgaccccaaaaagctagacttccttgtcttgactagttctatggccacaatcagtggttctcctggtcaaagcaactatgctgcggctcaaaccgagatggaggcaatgggcgcggatattcctaactgtgttaccattactgttcctcctttgactgatggtggtgtcttcgtccgaagtatgccgactggaaacgctcgaagtgctgcgctggacaaatacaaagatctcggaatgagtggttacaagctggcgcgccactgtgtggacgcaatctggactctcaactcacctgcttataaccctgtatacatccctacgaccaattggaagcgagttatggaaattgccgttccagagtatcaccaggccagcatgcgacatcttttggtcaaggaaactagcgacggtgcaacctccaacggtgccaaggagcagtcaattctcggagcttgcgcctcggttttgtcccttgacatcgaccgagtcgaagacaacatccctttctcgacctacggtttggattcgctgacgtctgtacgtctgagtggtatcctcaggacttactttggtgtggaggttactcagttgcagctcctcagtcaaacgatgactgtcgctcggttgtatcagcttcaagaagagcagaaaacttctgctgctaccactgtcactgccaacggcccttctgagggcgagcaggccaacgttcacgaagctgatttggaccagaccgttgttcgactcaacaccgcaaccgaagggactcctctcttcctcatgcacggtgctggtggaggcatcctcgtccttgtcaaagctgcccagaaggctcattaccctgtctacggtgtgcaagacactgtggaagcacctatcaccggcaccttacgccgactctccgaattctaccttaagaaaatccaggagaagcagtcccatggtccttatcgccttggaggattctccttcggtacatgccttgcgttggatatggccgaattgttacagaagcggggtgaagttgtggaagccttagttcttctcgatggctccccgactctcttcaagcgacctgcattccaatcatacatcatgggacgaatccaagatggcactctccgcgaagatatcctcggtattgtcaacgatatggcgtcgagcggaacactcgataactccgagcacttgagctaccagttcgcagatcactttcaacattccaaagacggtggaagcggtggacccaagtggatcgctcgtttctgcactgcctatgtcgctcacgtcctaatgggtgttcgccgcggtaaagaagtcaacgcggaggaagctgcttctggggaaaggatcactggagagtggcctgcgaagaggacagtcctcgtgcgcgctttggaaggtgtatacgcccagccttgcgccgccggtgcttccgagtacttcgacctggatctttatgccccaaacgtggagaagtatgatttggctggtacacattttggtattctctctcccaagtcgggtcttgataccattctcgataacttcttctga

SEQ ID NO: 287 - DNA, 1647 bp, Moniliophthora roreri
atgcgtcgttcttcactagcctaccgtcgtgtcctccccggtgcacccacctctcgatctgctgcctcctacgctatcggctttgaaaacgctcaagagcagcgtgtccccgtcgaccttaccatccatggcacgattccgtcctggcttagtggtgtcttatatcggacaggaccaggaacctaccggattccctcaaccaataacccatcaggatccgttgacattcaacactggtttgacggactcagcatgaatcatcgcttcgagatccatcccggtggaagtcgagtatcttatcactctaggaaggcctctgaggactacgagaaacagatcatagaacacggcaaagtccccggcattgcctttggtcaacgaccagacatttgccagagcatctttcgcaagttcttcacggtctttcagcagatccgctctccaccacaacccagtacttctccgtccggtctcaatgtgcaagtcaccttgacgccagagatgcctggatggaagagcttgctccaacttgatcaccgccacacttctggtccacagtacattgtcgccaagaccgatgcagatggccttcaggtcattgatcctgtctccctcgagccactcgctacagggacctataagacattggatccacgactcgatggtcagctcagcgccgcgcattcatgccgcgacaaggagaccaacgagttcttcaattactcctgcaaggttggcggtcgttttgctacgtacaaggtgtttagaatcaatggtgatgatatagtggacgtccttgctgagatcaaagacgcgcctgcttcataccttcactcctttgctatgacctcgaagtacgtcgtccttgcggtctggcaagctcatatcactgggtatgggctgtcgatactctacaaccggaatatcgcagagtccattgacaagaaatggaatcccaatttaaagagcgtcttctacgtcattgataagaggaatggaggcattgtagcgaaatatgagactcccccgttcttctgtttccatcaactcaatgcctacgacgatcctgcgaaggacgatatcgtagtggatatgtcagtctacgatgacaacacggtaatagaccgcctctacctcgataagcttcgcaatctcacagccgagaaccccatgctcatgggacgtgctcgccgttttcgccttaatgccgtttcctcttcatccaagtccacaagaccagccatcgtcgacttcaccttttcgcaatctgaatcaatcgaacttcccactattaacccattcagctaccacaagccttaccgttacgcgtatggaatcaacaagctggatcctcgggcccatcatacgttcgcagataggatcatcaagctcgacatgcagaacatcaatcacggacataaggtctggggtatcccaggctataccccgagcgaaccgatattcgttccacgtcccgggtcagaagctgaggacgacggtgtccttcttagcgtggttctcgatggagagcgcggaaggagcatgttgattgtactgaatgcagaggatatgactgaatgtgctagggccgagatggagacaacttttcccattggattccatggcatttggacttcgacggagtga

SEQ ID NO: 288 - DNA, 1779 bp, Moniliophthora roreri
atggcatccaactggaaaccaaaacgctcgtttgaagaagtggagaaactgttatgtgcaccaggaacactgttggaaatggaacagaggttgattgctggccaagttcagcgcgtctacaaaaacttatggccatctgtccgactattctttctctccgtcaccgccctacatgcggacaagatcaatgtggtgtttgagaacgaacgtctgacttttcaggagatgaatgagcgtgccactcgagcggcagcgattcttcgcgatgtctatggtgtattgaagggtgaccgtgtagccatttgctctcgcaactttcctgaatacctggtcgtcttttgggctatccatctccttggagctgtaccagtattagtgaacgcttggttaccaagcgaacctctagagcattgtctgacgcgggcgcggcccaaactcatattcttggatccagaaagagcaaagatcgtgcaacctatggtgccaaaattgtccaaaataggcgtgaaagcatatatcgttttgcaaagtcacgaagggaaaggacagtggccaggcatgcagacttgggaggccgttacgaagagctataggggagacgcttcaaccgttctgacccaagaccccggtatcctccccgaagataactgcattattatcttcacctcagggtcgacgggacttccaaagggcgtccttttgagtcagcgggcgtttgttactgctatcggcaatgccctcgctggacgaggtcgtgccttactccgtaagggagaatcattccctccgcccccggcagaaggtcctcagccgggattgttactaccaacaccgttcttccatgttaccggtacaaccttgactttatttgctgctgtcggcggagccaaactcgttctaatgcgcaagtgggatgtgaaagaagccgtcagactattcaaagcggagaacatcacagctgctggcggtgtaccctcaacagtagttgacttgctcgacaacggaggatctggacatccactagatggcgtgatgcttggaggtgcagccgtctcgtcgacgatagctgcgcgagccaaggcagcgttccctggttccacattatcacaggcttatggtcagacagagtgcaatgcgactgctgttggattctctggagaggactatgagacccggctcagttcatgcggacgcgctatgcctgtcaacgatctgttaatcatgaaagacgatgtagagtgcaagctgggtgaaccaggtgaagtctggattcggggaccgaacgttatgaaggaatattggggcgatccagtcgccacagcaaaggtcctcacgaaagatggctgggtgaaaactggtgacatcggatacatggatgaagaagggttcctttacatcaaagaccggttgaaagatatcatcattcgtggaggtgaaaatgtcgactctgtgatggttgagaacgctttatatagggatcctcggatctttgaagcagctgctgtcggggtccctgacagacgactaggcgaattggtcgctgccctcgtcacgttgaaatctgcgtatagaggcaaaggacaggttacagaagccgagctgctggctttagctcggaaacatttacctaggttcgcagtacccgtgatgattttgattcgggaaggagattttgagcacaccccgtctgagaagatcatcaagatgcaactacgaaagattgccgctgaagagtgggagaaacgcaaggcttctgaaaacggacaggccaaattgtag

SEQ ID NO: 289 - DNA, 1591 bp, Moniliophthora roreri
atgtcgaccagggaaaaacaaaacagcgcggacacagttctcgagaatgacgaggctgaattggcgaggatgggttacaagcaggagttgaagagggacttggggttattacagaattttggaatgtccttctcaatcatatcggtcatgactggaataccatcccttttcgcatatggactcaataccggaggaccggcagtgatggtatggggatggatcatagtttccgtgtttacaatgcttgtgggcctggccatggcagaggtttgcagtgcccacccgacttccggaggaccctacttttgggctgctatgttatcgagtcctgaagacgcaccactgctatcatggataacggggtggttcaacttgttgggacaagtcgctgtcaccactggaatcagctttggttgcgctagcttcatatcaacaatctgcacattcaacacagatttcgagcctacaccaaacactcaaattggtatatacgccgccgtactcgtcagccaaggcctcataaatacctttggagtccacctcctacatcacctcaacaacatctcagtctggtggcatgctgctgggacattctcagtagtagtcgccatactagccaaagcacccacccatcaatcggcgcatttcgtctttcagacattcctggatggtaccggtggatgggcagaaagagctagcccagcttatgtagccgtcatcgggattcttatggcacagtatacgcttaccggattcgatgctagcgctcatatgaccgaagagacacgcaatgccgccatgtcgggaagtcttggcattattatggccattggcgtttctgcgctgctaggatggtatctcatcctgggattgctgttttcgattcaaaatttggaccgaacactcgattctccaagtggacaaccggtcgctcagatattcatcgataccgttggcgtgaatggcgcaattgcacttatggtagtggttattggatgcatgtacttttgcgggacattctcaataacgtcaaactctcgcatgatgtacgcctttgcgagagatggtggcattcctggctcccaattctttgcctatgttaacacgaaatggaagtcgccgatacgaacggtctggcttgcctgcactctgagtttcatcctcgggttgcccagcttaggtagcactgttgcattctcagcggcaacatcgatcgccactattggattgtacacctcatacggcatacctatcgcattacgaatcgtctaccaccagaaatttgtcaaaggacccttccatctacacaagttctccttccccgtcgctatcacagctgttctgtggatcgcgtttatctcgatcgtctttattctaccacaagtcaaccctgtcgattcgcagacgctcaactattcgattgtcgctgttggcatcgtcatcatatatagcgtagggttttggttgttgagtgctagaaagtggtttactggacctgtcaagcagattgctgctgaggagatgggtattaatgttatggagccaggaacagcagagaaagttgaagagatggagagggagaaggctcgta

SEQ ID NO: 290 - DNA, 8360 bp, Hypholoma sublateritium
atggctttgaagcccattgcaattgtgagaatctgctctctgatgtactgtgattggcgcagatttataatgtcttcaatttaggttggaatatcggctgaatttccaagcggagcctacagcactcaaaatttgaactatgacgatttttcaaaatttcttctcagcaaaggagaatcctacgagaaagtcccaaaggatcgttttgatatcgagcggtgagtagaggagctggcgacatatttccacacctcttattctgatgcaacttacagctggcatggccagggtcttggtcgtaccattacccagaaagggtctttcctcaaggatgttaccctcttcgatcatgtggaatttgggattacctcaaaggatgctaagaatatgtcgcttgggacgcgcaaacttgttgaacatgcatttcttgctctcctagactctggaatcaactatcgcggaaggaacgtcggatgttacatgtccgcgacagcatttgacatacatggtgtgtcggagcctgtaagtttcttcttggatactgtaatggttttgactgatatctgtttacgtactaggatgagttagaggccattggatcattctctggatatcccaacgctgttgcaaataaagtctcgtaccatctggatttgagaggaccgtcgataccaacggacacggcttgtagctcatctctttctgctctccatctcgccgtccaggccattcgatctggtgactgctcggccgcagtaataggtggatgtcagcttaacttccggtatgaaggcagtacttctttaactctcttcttccaaactgacttgctaccagacttatagacttcatcttgtatagtcaagggtcgattctttctgcagatggaaaatgcaagccactggatgagtcggcaaacgggtatgtcttttgacgggccaccctatactatcttctgatcttccccatagattttcacgcggagagggcgcaacggttatcgtcctgaaattgctggaagaggcgattcgagataatgactatatatatggctctgtaagaatccttgtcataagtgtcatcaaattatttatttaaatgtgggttttattagatactaggtacaggcatcaattcgtctggttctcttgcacccaccagcgctccggttgcatcggcgcagcaggaggcaatgaaaagggcgttcaaggacaccggccgcaccccgtcggaggtagattatgtcgagctgcatgccactggtagggttacttcgattctataaaggtgtaatattaatttaagattattgttacttcagggacatctgcaggcgatcctgtcgaagccaactgggttggccaggtgtttggtcagcgtgactccgagctcttggtaggaagcgtgaaaggaaatatcgggtgagtctgaaggtcaaatatttttcagaatttatgactcacatactcaatcccttcagacacttagagatatgtgcattcctagcatctctctgcaaggtctgcgcgatgttccagaccaggctattgccaccaaccgtgaacttatcaaagccgaatccagccattgcatggggtcgctggaatatgcgtgcccctaccgaggtcttgtccattgcaggaggtaaaaaccagcttctagtgtcaattgcaagttcaggaattggtggagccaacggtcatgccctcgtagaatccttctcaccagcacagccgttacaaatctctcagccagctcacgaacaccctttattgatcatgactggcggattatctcctaggagtgcaactgaaatgggaaattctatcgattctgcatggaaagatagttctttaggggacctaccagtgttatcgtcaatctggagtagacgtggtcgccagatgccttggcagacattctcgatcaagtcgaactacgccagtgtcgttccctttgcaaaaccgacactccttccgaagtctattcctggcctagtttttgtattttcagggcaaggcccacaatatatcctcagtgagttcagctatataatatgcagacatgcacatatttattcgggatacaaatcagtgggaagtcagctttttgaaagttacccagcattccgaaacagcattcttggaatggatgttgtatacgaaaagatagttggtcattcgataagatctcttggactcttttcgagtggctcgactgacaagtggggaatttggcccatcaccgtcaccttgcctgcgatcgcgatggtgcaaatggcgatatacgacctcctttccagtatcggaatcgttcccagagccgtcgttggtcattctgcaggagaaacagcaatgatgtatgcctctggtgcttgttcgagagatatggccctcgagatttccattgcacgtagtagagcgctcgggactttggaatgtttgggcggctcgatggtggcgttgggctgcgggccggatgaggctcaggcaatcattgatgacgtgctggccaaccaaacaggtatcctccaaatcgcgtgccacaattcggactctgctgttactgtctccggcgctgagccactcttggactctgttgtcgccctcgcaaaatcccgggacatatccgcacacaaactccgcaccaaagttgctgtgcattccgacttcgtcgaacagtgcaaagccacatattaccagcaggtggaggacatattcactcgttatccgggacatcatgtacctttggtttcaacatactcttcgaccttcggtacaatctggtcaggacccttcactcctgattactactggtgcaatgctcgccagccagtgttgttcagccaggctatcaacatgataatcaaagaccacccggaagttggcttcgtagagatttctccccatccagtgctttctacatacatatgcgacgcaggagtcgagcaagaacgtgtactgtgcttcatgaggcgcactagggatcctcatccatcctcggagcctatcatgtttctacgagggattgccaagctctctctccttgggtataccgacatagattttcactcgttgaacaacactcgggcttcctccaaagataggtctatttcttacccattccagcggaaatatgttccgttccgtcctgaaccgccaaaatctacgatgtatgcccgctcaaacgaatggtccggacctctactccacacgggtctccgtttgaatgctgcaactcaccccaagttagctgagcatgtcattatgggcgaacctatattacctgcggcgggatttcttgagatggtaaaatttcactctgaattttacaggtttccttgctaatatccctccaaaaaggtcttcgaatctggcgcccaactagcatggaacattcgattccactctatgctttctctttctagcgagcgaccgttgcctgtatcgttcactgtaaatgggccttcctggtccgttagctcagagttgcaatctcatccttactcagtgcgtcgggagagtttttatttgaaataattactgacatgttacgagaagaagaaacgaattcatgccgaaggatacatgtcctcgacggcagttttggattctcgtaaactttccatcagtgatctaaaaagaaacctgcaacaggtcgatatatcgggttcgtgtgtttgtgttcttgtagtaagtatgttctcacatatctttccaggtctttatagtgtcttgaatcatttctcccgatacggaccagtcttccaacgagttaacgcatgctggaggtccaacacggaggcccttgttgaaatccgtgcatatgatgcagatcttgaagagtgagatacattcaccgctctaagcaacgtagttcatcactcaatatccatattccagcctcgataaatatgtcattcacccagctcttttggacgcatgtttccatatcgtcgttcaccccatgtttacagcaaatgcagatcgatcagtgtactacctccctacatctgtggaaacggttacggtgcacgatccctggttcatacgacaaacccttcctaagattgtgtatagtcatgtagcgtacaaatcatgggacccaggtgagcgtctactactactgttggaagatttcagcccctgaacaatttaacagcgggcatcactttcgacctatcagtagctgatgctagtggtaacataatttgccaactattaggttttcgaattgccaagcacaaaaaaacatccaccgttgaatttgaacatcaagtacaattcgatagccgatacgaaatcgtttatcaacctctcctgacgtctacaccatacacactttcgcaacccaaagtcgtggctctccctgtacaattccagtcaaatcatgcgatcgcttccatggtacgtctttgtgtaatgcgagcctcattgaatctaataaaaccttaggagctccaaagtaccgatggaaagaagccaatagattcggtggagaatattctcagattcctccgaactcaggtcggattgagcgtcattcgcgtgttgagcgttggatccggtaaatatcaaagcaattatatatcatataagattatgacccctttcatcatcagaaccacttaaattgttacgtgcattgacagaatcaaattttctctaccagtctatcctccatcttgacgtccttgtcaagcgggagtctctaactgaagtaccgttgaaaggagtcggaaggattatacagtccgtccacgcccaggaagggaggaacggcaatgacacttctttctacgatgttgtactggtacacgaagatgggtccgataccgctgccctgcaacacatcgttcaaagactacttcccggaggctttcttatattgaccaccgacgatgtcgatttggacgcctcattaacggcgacggactgctcaccaaattctcatgtcatatttcagaataagctcaccaccgggcttctgacagcatgcactgctgctgtttcctcgggtcaagtgaaagcatcagacgcattctcgacatgcgaagagccggtgcgggtcatagggcaggaactttctccgacgaaaacaatcatcaagtcattcccattcaacgatgtcttatcccttcagcaaacaatccaagcgctttctgaaaacgagacgctatggatagaatctccacaagatgcgaacgggtatgccgccactggattagtgagatccctgcagcacgagatggtcaccaaggacattcgtctagccttgttcgatgtcaaatggtccccagaagaaagaactgcaatggtgtcatcattctcttcctatccctacatcgaaaaggaagttctcgttgactctttcggtgtgatacgcgttccacggctggtcccgtcttcgatacttgtcactggtacaagctggtatgatcaagcgaggaattccactggccgcaacattggggatggacccgcctcacacccctccccagtcttcaaatatcggctgtcaccatcccatgcgcaagttcatgtgatcagttcgtcgtctgagtgcgtaggccacaaggcggttatcggatacgtcctggacgctggcactacgacttgggcacagggcacatacgtggtatgcaccacgcgggacctcatcgcgaatgctgaatctgtcgccgtccacgaacactcgttgttggagtatacacatttcggttcacattctccttcggccatatcaggtggtgccatgaccgtctttattgctgctcttgcaattggctccaggacacttgcccgccccgacgccttgggcaaccttcgagtatcagtcacacgaaacggcccagaagacgaaatcagtctgtcattgagtgcgcttctgaccctactcggcatcacggttaccactatctcgaaacccataactccagaggtcctgagcggcattcgttcgtcagacgtcgtactcacagggtggtccaacccaagtgatatagagaccataaccagcttgctcccagagtcagcgacgttcctttcttggaatgctccccaagcagatgttgttaaccttctgaaacgaaatacatggatggttggcgacattctacacggcacccgcgatatcttacaccactttttgagtcaccaagagtcgcagacggaagacggaattgcccctgtggaatcgcagaccaaaagtcaaccaacatcgacctccgattctttgtttgacgcgtcaaaggagtattacctgattggcggtataggatcattaggagtccgagcggcattgtggatgtacgaggtcagttggatatgaaattcacgacatgttcattccactcatcggctactttcagaacggtgcacggatgctggtccttacttcgcgacgtggagattcttcgtctcttgccaagtcaggagatgaaatggcaattcggatgctcttatatctacagaaccgcatggatctccgcataagattggaagcgtgcgacgctagttctgttcctgagatgactgcacttttccgtcgagcagatgcgccaatcggtggcgccattctcgcctccgtggttctggcagacaagttgttcgttgcgtatgacaagtcgagctactgtgctccgtttccgggaaaaattggcgcgttggtggcactcgagcgcgccattgacatcaagtcccttgatttcttggtctcgatctcctccgtgtctgccctcggaaacgtggggcaaaccaactatgccaggtaactcattcgttccattgtcaccttacgcggcgctaataagccccattagcgctaatactgcagtcgacggcttgctttcaaagtatacgaatgccttttccataatgtctcctgcgatcatcgacagtactattatgtcgaccggccttgacttgtcgccggacccacgatacaagggctggctggaatgtgcaatgacttgctccggtacgtcggattactggaatgttaacagcgtatgacagagtctaattgacgacgtcaatgtagaactcctcgagtgtgtaggtgacgggattcgtgtcatagcaaacaaacgaatgtctctatacgtccctcgattgaactggtattatatgaagaagcatctagggccatctcctatatacaaccatctcgtttacgagcctacgcaaaacaaagaagaggcatccaccaatagcgcagacgtgctgatacccgccatcatcatgaagctgttggacattgagcaggatgatttttcacccgacatcccgctcacctcgtacggcctagactccctgtcagccggacgtctctcgcactccctgaaaccattcctccaaatttcccagcttcagctccttgcagacgttagccttgaagatattcaaaggcgtattgaggacaacaagaaggctaatgtccccaccgaagtaccagaaacagctcagaatagcgattttgactgggccgcactcaaccagccggggcagacactggtcaagttggtcggcggagacggcgtcccgctcatcgttgtccacggcgtgaacggaaacatcgtccctttcattccgctgcaagagcagttcacaacgccgctgtgggcaatacaactcacaccagactgtcctactgactcgatgcaagccctggccgctttctacttgatgcaaatcaagacagcacgcccctctgggccataccgaattggggggtattccgcaggcacccttttggcgtttgaaatagcgtaccttttgcatgcctctggtgaccaagtcttacagatggtggtttttgacttcttccccacgatcttgaccgctcctcatttccagccggaccacgagacgatcgagacaaggaaagccagtcacgctatgcaaaccacattgattgagttgctcctcggcacctactcgcgggagtcaaaggtctcgcaccagcgcattgccactgagctcaagggcgcatgggctggcgaagaggtgccgcagctcgcgcaagactacgtggcgggcgtaagcaagatggccacgatgttcgcaaaattcttgatcgatctttgctttattgagcgcgcggaccaggtcccctcccaggagatttatcgcattctccgcgagtggagtatgagagtcgaccttccactcgtcatcgcgatcgcagaacatgggttgttcgagtcgctgcctgagccaaccgaccagtggaccaatctggcgtggacgggggccagtatcatcaatttgccgtcctgcggccattacagtatgctggagtccccggtccttgttgatgcattgcaagatggatggcgcgcaaaggaagaaagcccgtag

SEQ ID NO: 291 - DNA, 1426 bp, Hypholoma sublateritium
tcaaacaatctgtttggaagatttgctcgagctgtcgtagtcgtgatcgttactgacggcatgttcgatgtttattgccaggggacgcaggggataattatttgtcttgaaaggagtgcgatctcttccaccaacaatggcgttctgtgatccgctgtttgcactgttcacgctagcgacggttgattgctgagcccatccaagacctacgcggacatttattagcatgaaagagattcccgacatggctgacaagcaatcgatgccaatgaattgaagattcgactgggattgataagtggcaaaaaagaatgttgtccacgctctattgtattcgtgagttggtccttcgcagtatcctttctatgacacttacgtataaacgaaggcgctttcgacaataattccaagaatactcttgaataaaaagtcccagatcagctcattggtccaaattattaagtatcttttgcgtacggatagatttcgagatcctatggaacggacagacctgtttatcctccatatcctccacgaaattcccactatacatatctgagtaaacaattaaatgtaacacaactgactatcaagccttaccgctgctatacagattcgtgctaataagggaatatcgattatggattagaggctgattacaggacaaatttaagatgacttaccaaagggtgaacacggtatcgctcgttatccagcgcccagcttcagacaagaaaactggctgccccggctggtacatgctaaattgaaccgtgattccagttccacaaactttcgacggtgaatgtgaacagactccttcatatatgaacatacatactcacttgcaagtccgataaatgaacaaattggaaatataatgattgccttgttatacccccacacaacccacaaccgatatatctatgtatagaattcaatttcaagttatgccactagcatttgaggttgaaaactagaggactcacaatcattgcatcacctgctagtaaacttactatcagaaaaccagtttttgctacttcggtttcttgacttagatctgcaaaaaaggccagcggtgcatctcctgagggagagttgacgaacgccttgaatagccttacgcaatctatcagccaatgctgccaattgaaataagcctcatttcgtgaatcaagaaaatcggaacgacacttactgctgttacagatatgaacagaacgaaagaggacacaatgagtgggtttctcaaagttgacgacagcttttggccgtttccgtgtgctctttcaacttccgtgagcttgtgggtcgacaagaggtatgtggaaaatacaaagagaaccagaaatatgccataaagacagctttcgacacagatagtggccagactaactgaaacgagaggaatgttaggcgtcat

SEQ ID NO: 292 - DNA, 4076 bp, Hypholoma sublateritium
ttacataaaacctacagcacgccagtatgagacccacaatttcgcatccaccccgctcagctgctccgaattagccaacgtgggggaggctttcacggcgttctccgtagaaagacgtggaagcccaaaagcctcgcatgcgttctcgactgtcccatcggccttaagccccaggctcctgtagaaattgagcagtcgcaaagccgcaactgaattaaggctcgtatctgtatcttctttctgagcgagcgctaaatgttctaacttggataaccattcgtgataagggacgagaggaacagagagctcggttgatagcgcctttgccagcgtcggccatggagtcggagtgggatgaacaagatgaacaatccctgattctggagcgttcattatgtcgaccaagcttcgaccagcgacgtgaactggaagccaagatatatcctgtgccaaccatatagatatcaataatcacataaagaagcggtgttatttaaaatacctttccgacattcgggaggcaggagacgaattttgcactctgaactaaagctggaagccattctttggtgctccaaaatccgttcggtccaccgctgatctggcccacacgaacgatgacggttttgagaggggtggttgacgatgcggccctcagtacctgctccgaaacccacttcgattccgtatatcctgtcccaatagccacttgggcttcaataggcaactctgggagattttcgacagtagagattgggttttggaaaacaccaatagtactggtgaagatcgcagtaggagggcggggaagcggggaagaaagagagaagtcaatgaggctacgcagtccccgaacgtttgcctcaaatgatgtgagtgataggttgaaatccacaggccaagctgactccaacaaatgaatggtgatttgaagcgaagaattatattatgacctaccgttatgtatgatgtgcgtgacggacttttgcatcttcaaaatggtgttattttatgtgtttggaggaataatcaaagtcgttacgtaccatatcgtaaactgttcgttccagcgaccagtatggctcatccaatcttccttccaacaaagttatcttgggggattccaatatgcttagcggaagcgctttatcaagtaaagaagttcgctggcggtcgagcagggtggcagatccgtccttcgatggtcggttaatgcagtacacgcgttcaacaccgtcatccgcaacaagagcgctgaggatgaacgttccgagcccccctgttgaaccggtgagaagcacaatcttgtgatcgggaaatgggctggtcccaggattgtgtcctggaaaattggccgagtacttggcggccatatcttccatacctttctgcctgacgtcatccgcagattggtgggtctggttaccagagatgtgggcgaccagaaacgtagcaagcgccgatatggtagggtagtcgtacacaaagttgttggcattccttcgggtatccaattggatactatcgcgcagcgcacgcgtgagcgtattcctgatccatgtcgcttgaaggctgtaataaggcatagactgagaaaagcgtctgggtgagtattggatgacatacctgtcacacccatgctggaaaatgtcatcgtcgtctttgacctggtgtactaagacaccgccgacgacagctctaacaaaattggtggcagagacaatgtcccactccttcgggagagggatgctcgtttgcgtagtgcgatccacggcgtcatacacagcctccacctcgtctacgtaatttttgagaatggcctgacggcgcgcggtgttctttgccgtatattcgaatggtttgctaggctttgcaacaacaatcatctccttaaataaccgagaatgctggggggcgaactgattcatcttctggatcgtcggcctgtttcggctcagtacataccctaattcgcactgaagagtgactacgtaccatatcttgtttctaaagctctcgagcgcggtatcgtcagacggatcgaatttgaaggcaggcttggggtctatgagaactccggcttggaattttccacgcccaaacatcacagaagattggacgtgagggtcttgattgaggatattttcttcgtaaaaaccattagttgggcttgggttatttttttttaaaaaaaaacacataccgagagggcctggattcgtctaataacatttaaaggaaacatttattagcggcaacaaatggttacacaagtccgaactaccttctctccggtgttgtgcataatctgatcgtcggttctgccaaacactttccaataaccaggtttcgtcgggtgcgccatcaagaggtcagatgtagcataggcatcgactccgtttacttgggtgtttatcactgacggatggcaatattcattcgcctgttatgaagtgtcatgcgagcgtcgcatctccccgaattgtggacttacgaccataacgaattcgtaggtgttctcatgatatagaaccatttcagctttcaccaagcccgggaacttgaaatattcccagtcatacccaggcgacgctgtttatatatcagtgtacttgttcctgtgttaatggtatttctaaatagcagtacctggaagtataggactcatcaccccgccctcagttctacaaaaataagatttcaaggactcgtaaattgcaaagtaacttacgctccgtagagaacaaaaatggaaaccccttgggaggtcatataatctccggcagccttgttcaatggcccaccaccgtacagctttgagggtttcaatgagtgtcaaggattttgtatcttatatacttccatgcttacaacacctctacgggtagcgagccattttacgtacaccggattccgagaccacgcctaacaaagtgatcaggcaactggaagagcattgcagccggagttagacacatacttcaatgattgctggtacgcagaagattatatcactttgcgtggccacagccgcgtgaaataagttgtccggggttggtatttgtgcaggagactttggttcaaatgcactgagtactacgccgcacgccgcctatgatcaagttgaaaaatacgtaaagaaaaatattgtatagatttgataaatagcgtaccgtccaggagcattgcataacgcccattccgtgatacatgggcatagtgtgaagcgataatacctggtctgtcaaatcatgctctccgaagtatgggataatacccaattcgagaaagcggaagtttgtaaacggaattggctttggaaacgcggttgaacctggattgaggtcttttattagaatatatattaggttcaagtgctagtacatacctgaggaatggagatatgcgattatatgattgggttcctttggaacggatggaagtgtttcgaaattgtcgcgagcatcacgataaaggtcctcgaaacaaggcatagcaatcaacttcgggtagactacttgcgtactgtaattgtccttcaaggcctgaagagactcatttgccaagtctgtcatagatatctcattcccgacgagaatatagcgaacgccgacagatttgatgaggtgggcaatagcaggtggcgaattacgcggagagatcgggaaaaccgtgcagccactgcgtatgactgccatgatcatggtgaagtacgttatagtatctgtgagtaacccggattttatattaattgtgaccacaaaatcgaggggttaaagggtaccggttgctccaagaattgcaacaatgggagggacgtctgactctgctttccagtcgacgttgtgctgcaaaaatttgacaccgttgtagatggcccgtacggcttccggccagtatattgtcctgatatcattattgttgtcagcaaatatgaaaagtcggtgagacgggttatgtttataattccagtcgtatatctctggaagcgtaagggaaccatccaaaggaggaggctgaaaggttttcgactgtagaacttgactctgcggaggagtcggtattttggcgaacat

SEQ ID NO: 293 - DNA, 1649 bp, Hypholoma sublateritium
ctacttgtcaatcttaggcacacggcgcacatagacgtctttgaatgcactctccgcctgcccctcgggcttgacaaacccagccgcgcgcttctcctccgccagcacgcgcacaacgcccaggagatcgtccacggccgcctccgaagtctggatgtgcaccaccaggcgcgagcccccgaggaaaagcggctccggcagcgcagaaccgcggttgccgatctcgtcaaaggtgaccccgatgggggtggggtcgtagaagatctaccacgtatataaacgttatttcatgtcctggtagagaaagtattggctgcttaccatgcaggtctccgcgcggctgaggatcgcgcagccgatctcctcgaggcccgcctcgagccgccgtgcaagcgcgtgtacgcgcgggagctgcggaaagttgtgcgtcaatgcgtacgcgcccgccgctgcgaggatgcctgtctggcgcatgccgccgccaaaaagcttgcggaaccggcgtgctttcgcgatgaactcctttgtgccaacgaggaccgagccaaccggggcgcctgtattcgcatgcggtttcagagaatgagatttgagagaggtagcggggacagcgtacctaggcccttgctaaggcacaggctgacggagtcgaagggcgcacaaagttcgctcaacggcatttctgtctcggcagcgacatgccatatccgggcgccgtcaaggtgcatcttgaccccgacagagtgcgcgtattccgagatagcgatgacttcctcctgcgggattatcgtcccgttgagcgtgttctcgagagcaacgatctcagtcggtgcgctggtactgtgcgtgagcgtatgcgcctggcgtggaaacgtgcagcgtacaagtgaccgtcgtcgctgatgatgatgttgtccttaacatcctgcagcgtcagatggtgctctgcgtggattcatgattatttattttgttctgagaatacacagctttctcactgttagacggaatcacgggaatcacggctgcgcccgagtggaaggccgcgcctccagcttcgtatctgatagcccagtcagcaaaatgtattcaaacagaacaaagaaatatgaagttcacttgtgaatgtgagcgcgatggtcgcatatgatggaatatggcggttgcttcaagtgtgtgcggaggccgatttgattcgacgcggttcccgatgggaggtagagcccggcctccttgcccgttattttggcgatatgggcttccagagccctgtatgattggcatattcccctagtcaggcgtagattttccgggtaggtcaaacgactgacgcagaggacggctcaaagtacacatcgtcgccgagtgtcgcgagcgttgcatacgcgtacatatcctcagtgggcactgatcacgggaaacctaactcagccacactcgcatttcagataggcgctcgagatcaacctgtcactgtgtccgctgcacgccacccggtaagagatcggagcgtaagtagggcagtgttgcttacatatgaacgttcgggcgatctccttgcgcttcttggcgttctccaacgcatgcgtctccgagaggatgtcaaacttgaccgtgtcagcgatactggagaaagcggcggtggccat

SEQ ID NO: 294 - DNA, 909 bp, Ceriporiopsis subvermispora
atgcgtatcattgttacaggtgcatctggactccttggctcccagatatatgctgcattcaagaatacggaacatacggttctgggccttgcgcactcacgcgcgacaggagagctgcagaagctagatctcttggatagcaaggaggtcgagaaggtcttcgcagatttcaacccggaatgggtgatacactgtgcggcggagcgcaggccagatgtagcggagaagaaccccgacgggacgcggaaacttaacgtcgaaatcccccttcaccttgcacaattgtccaagtccctcaagtatacgctaatctacatctctaccgactatgtgttcgatggaacctcaccaccctacacccctggtgcactcacgaaccctgtcaacctctacggccagacgaagcgcgacggtgagctcgctgtcctcggcgtatctgacgcgcgtgcggtcgtcctgcgtgtgcctgtgctctacgggcctacgcccaacaatactgactcggcggtgaacatccttctggacatcgtcgcggaccagtcgggcaagacatacaagatggaccactacgcaacgcgcttcccgacgggcgtcgtcgacatcgcggatttcctcgtgaggctggctacactcccgccgtcccgacagatcccaccgatcctgcactactctgcgagtgagccgttcaccaagtacgagatgtgcctcatcttcgcgcgtatccttggtgtgccgcattcgcacatcattcccgacgcagaggctcccaagggtgatgcagcaacgtcgcgccctcgcgattgtcagctgtatacccgcgaaacggaagacctgatggagggatacggcggtctcggctggacgccattcgaggagtggtgggtcgactatctaaacaagaggcagtga

SEQ ID NO: 295 - DNA, 1899 bp, Ceriporiopsis subvermispora
atgtctgcgactgcaggcatctcacaggtcgctctgggaggctcagtgcccccactcactgctcatgctatctctgtatctctgccgacatggaatgacaacgttgggtatgagaagggcgagaagagggtcgtggatgcgatggtcactggctacccgcgtttcttcatccatcgcagtattcaaaagctagctcgtatctgcgagcagaagtttggcgcgaacggtgaacgatgcctgctgtgtccgactcgcaaagttgcagaggcgtgccgctcctacatgatcgatagatctgcgaaggctggctcacaggtcactgtgcgcctcgttcaattcttcataagccccgagggcgagaaagattgcaccaaccgtagcatcgaactccatattgccctgttcccgggcgagtccttcccgtttgccaaagaattttggcagcacacaggtttgtgcatctcgagccgtcgtgctgagcgctgcttgtctatgttgccggaggagagtcccgtctcgggatctccgacgtccccatctctcgctcgcccgcccaccaagcctggaaatagacactactctaacaagagtctcagctggactccctcgacatcacctccattgtcacagccgccaggctccacttccagatcccccgcagcgcctggagagaacctcagtttcgatcagaccacttacgtcgaggaacgctacggtcgcaacttacccctcgagtccgctgcgttcacaaaacgtgcactccgccgccgcatagcaggtgtgctcgtccgagacacccctagtgagtggtctactgcaggagcgcaagaggcagaagttggtccaagcacgagaggcgtggaaagtgtcacagaagacgatgtcttcctctacccgaccggtatgtcggcgatctggagtgctcatcagctggcccttggtacacgtccaactgcaaagagtatctgctttggattcccatatactgatactctcaagattctagagaagtggggacctggctgtcacttcttgggctatggcctcgattcggacatagacgaactggaggagatcctcaggcgagaatctgcagatacgactcatccgcctgcattggcgctcttcactgagttcccttccaacccgttgctgcgctcggcggatctgccacgtctccgcgccctggcagacaaatatgacttcctcatcgtcgttgacgagacgattggcaactttgtcaacgtcgaagtgctgccgtacgcagacgttgttgtcagcagcctgagcaaaatcttcagcggcgacgccaatgctatgggtggcagcctggtgctcaacccacaaggccgccactacgcagcgctcaaagctcacatggcgcagacgtacgaagacgtgtactttgacgaggacgcgatctacatggaacgcaactcgcgcgatttccagcagcgcatcgaggtcgtcgacggcaatacgctagccgtctgcaccctcctgcgcgagcgctccatcgtcgggggctccaccgacgcgcacaccgtcgtcaaggacgtgttctacccacggtggcagaccgccgagcattacgagaagtgccgccggccggacgggggctatggcggactattctcgatcacgttcacgaccaccgcagcgtctcgcgcgttcttcgacgcactccgctgccacaagggcccgagcctcgggacgaactttacgctggcgtgcccgtacacgattctggcgcacttcctggagctggactgggcggcgcagtatggcgtcgaggagggccttgtacgtgtcagcgtcggcatggaggagagacaagaactgttgaagatcttcgaggatgcgctgctcgcggcagaggcgacagtggaaagccagtga

SEQ ID NO: 296 - DNA, 951 bp, Ceriporiopsis subvermispora
atgcgggtctggtacatcatgcattacgtctactcattgccacccagcgcggtccacatcagcaacaatctatatacagtggggaaattagaccgtccgtcagtctcgctgggacttgattactttccaacccgaacctttccaacccttcgccgtcggagatggagcggaataaagcctggctgcggggcgctgcgggacataaaggaggacatggagatatctctgatcaagccgaacttggtacttcggaagacacggcacgacatcgcgttggtaagcatggcgttgggtacggtgaacatcgtgcggtatgtgacgggaacgccggtcgcatacaccattgcgacggacaaagctatccgactcacacaaagtcgagttgtcaaccctgcaaaagcgtacgagagaacgcaggaagatactcccccgtccactcgggaattcatcaggagacgtattgagattctcgtgtacctgcgtcatgctggattagcagaaactgaaatgaagcctctcgcggggctgctgcacccatgctatgttcaagaggctcagaggatcattcgatgtgatggcttcggcaagtccccatggattacgcagcacaaacttggatgcgtttcgtctgaggacaaagttgaacgaggaaacccactgagaaccccgctgtttacctctgcgactgatcgactgcgaaagtgtacatccacgacatgtgaaatgcacaagggcccagactcttttaagacgcttcgggtcggctcacggtcccagtgggcaagcgcaatacatcgtcaggccgacgttgtgcgagtatgggtggacagcatcgattctgcactcgctgcgacggagaacctgccagtggaggcgcaggaactgaatgatgttcttgcactcaatgaggacgagagtatcgggtgccaggtggagactcggagaggatga

SEQ ID NO: 297 - DNA, 1371 bp, Ceriporiopsis subvermispora
atgctcccctcgctgagaaactaccttcggtttattgatctcgagaacgaattcgcggatcatgggtttttgccaaagcctggagccggcttcaagcttgtgcaaggaatccgagagagctggactgacttcaccgctctcggacccggttacggtacatggaacgtgatacgctccgagatggacgacatgatgctgcggcatgcatccaagcaaggcgtcaaggtcttcgaagaaacccgtgtcgagaccctcgacttcgcaggggaccgcgcgtcttcgcgcccgctcgctgcgcactggtcgaacaagcacggcgcagcggggcgcatcacgttcgactggctcgtcgatgcctcggggcggagcgggatcatgtgcacaaagtacctcaagaaccgcacgatgcgcgagagtctgcgcaatgtcgcggtgtggggctactggaagggcgtgacgcgctacggcgagggcacgaagcgcgcatgctcgggctggttcgaggccctgacagatgaacaagggtggtcttggaccattccgttgaatgacgggacaacctcgattggcgtggtgatgcatgaatctgcgtcgaaagcgaagaaggcccaggccaaggccgacggccagaaaccgacccttacggagcactatctcgaccagctgcagtacctccccggcgtgcgcgagctcatcggcgacggaggcgaatttatccccgggagcacgaagagcgccgcagactacagctactcggcttccgcgtattctggcgaccattttcgcgtcatcggagacgcagccaactttgtggacccgttcttctcctccggagttcacattgcgatgaccggcgggttatctgcagcgataacaatctgcgcatccatcaggggtgacgccgatgagaatattgcacaaaggtggcacgatgccaaggttggaattgcgcataccagattcctgttcgtcgtactcggcgcgtaccagcaaatgcacttgcagtctgcccctgtcctgagcgatatcaatgcagaaaactttgacgatgcatttgagatgttccgccccatctacggcctcgcagacagccagacaaggctcacagatgcaaaggtgcagcacatgatggatgtctgccaaagcttcttcgacccatatgtcagcgaggagcatgtcctcggtgtacgtgcacgctatggacctgcatctgccacgcttgccggccccgtgctgggttcggagcagatcgagcagatggtcggtggtgacaccccagagcgtgagatggacacgcgcgtgctgcgcaagtttgatgcattgaaagtgttcagtgacgatgtcgaggcgacatatatggagcgaactgtc

SEQ ID NO: 298 - DNA, 1578 bp, Ceriporiopsis subvermispora
atggcgacagtgcatcttcacgatgagttgacgcaatctacggaacgggtcacggtccagacgcgctttggcacgatcagaggcgggcgtgctgcgaatggcgccgcggtcttcttggaggttccgtacgctctccccccggggaggtttttggacccggtcccattgcccgcggactatcagtatgaggagaaggattacatctacgaaagcagctacgcggctcaaccgattaatgacggtcaggcagctagtgtgccattcgaggacaaagtcggacgaggcgaacccactgagaaccctctgttcgtcaacatagtatccccgccgtcgtttccctctgcgactggcttgcctgtgaaagtgtacatccacggcggcttcttgcagtttgggtcgcctcacggtctcagtgggcaagcgcaatacattgcggccgagcgatcggaaatatgggtcaacgtcggataccgcctttccgcgtttggcttcctggcatgcgacgagccacgcgtcgaaggaaactttggtttcaaggaccagtggttggcgctgctatgggtccgtgacaacatcgaggcattcggaggcaatccagacaacatccaaatcagtggtctttccgcgggtgcccattctgtacatcagcttctgcattacgcttcgaggctgccagagggcaaaacggcgcccttcaattctgcagttctgcagtcgaactccattgtaatagccccgaaaacccccgccgagctgcgcccgcaattccgcgcgttctgcaccgcgctctccctcaacccggacggccccgacgccttaaccgtcctgcgcgacccggagctggtcccctggaaggccatcacgcacgcgatcgagaccgacgcgctcgggacccagtttggcaccttccgcggcagcctcgacggctcctggctttcctctgatccggaatcaatggcctggcagcgctccggcgcgttcgcccgcgcgttgcgaaagcgtggtgtgcggagcatcgcggtgggcgacctcacggaggaatggtacctgtactcgatcgcgcaccccgtgcggcgcatgcgtgatattgagctgaacatggagcggtattaccaggaggaggtcgtccacgccatgatggcgctgtacaggcgcgtccccgacggcgcgcctcccgaggattttgcgcgcctgtttggggagatgctgagcgaaggccaggtgcatttgcctgtgcggttgctcgcgagggacctcacgacggctgggttcccggtggtgcggtaccagattcgatggacgcccgagcagctgaggcctctcggatatgtcacgcatggaagcgaccggtcgctctgggcgcttcgtctacccgtgctcaagccagaccaggccgatgttgcgcgtgcgtggctggacagcatcaattccgcactcgctgcggcggagaacggggaggtacgagggctgaaggaggttctggctttgaatgaaaaccaaagtatcggatggagagacgatgacaagtgggacgagatcatgcgcctttgtcaggcgttgccgggggaggatgcataa

SEQ ID NO: 299 - DNA, 1080 bp, Ceriporiopsis subvermispora
atgaaggctgtggtaacaaacggaaacggggcatttgggctgaagtcagtcaaggttccgacacctgggcggggtgaggttctggtgaaggtcatcgccgcatctcaaaatccaaccgactggaaaacggctatgcttcatctcaagcctggaaacatcttgggctgtgactttgcgggtgtcatagcagatatcggcccagatgtcgacgcctccttaatgataacgcgcggcaagcgcgtcgcaggagccgttcatggaggcgtcagcccaaacggcgcctttgccgaatacgtgacagtactggcggacatggtcatcgcgatcccagacaagctttcattcgaggacgcttcgcaactcggcatcgcttgctacacgacatgccagtgtctctaccaggaactacatctaccgacgcctctggaacccctagaagtgccgatggacgttctcatctggtccggcacgtcgagcacaggtcaatatgcagtacagtttgccaagctcgcagggttgcgagtcctcagcacggcatctccgaagaattttgaacttgtaaaagatctaggtgcggacgaagtcttcgactacgcagactcgaagacagcacgaaagatcttcgcggcgacgagtggcactctgaaacacgctgtagattgtatcagcgagggcatgaccccgaaccaggtcagtatgtcgctgagcaaggaagggggaacgattgccacgcttttgccgtacgaaagccgtaagaagggtgtagagacacgatttgttcttgcgtacaaattctttggcaaggacatcgagttccctttcgtcttcccggcggatcaagagcataggaagaatgctcctgtgtattgtagactcatacaggaagtcatcacctgctttgggctgaaggctacgccggtgcgcatcttcccttacggcttggcgagcgtctcagatggatttgagtatatgagatccgggaagctttctgcggagaagatcacatacagaatttcggataccccaggtctagataagtgggatgtggccccgactgggagtgtcagaggttcctcgtga

SEQ ID NO: 300 - DNA, 975 bp, Ceriporiopsis subvermispora
atcgtttcaatggtgatcacctcgtccatcgtcttccttgtacccaacatcaagagaaccaaggcaggcgagtccagcgccgcaaagctcctccgtttcaagcgattggatctccttggtgtcactgtattcacggcatcactaattctcttcatcttcgctgtaacgtcgggttccatcgatggatggggatcggccaacgtcattgcacccctaattatttcagtggtcctcatggtcctcttcttcatttgggaggcacgtctcccggagtcttacgctgcgcttccaccaaagatgtggcaatatgaaaactttacaatcctcactgtcatctcgcttattcctttcatgtggtggggctcaatcttcccgctcttcgcttggctggacgagctggtctacggctggtcagcgatcaataccgcggcacacttcctgcccatcgggcttggtatttttcccatcctgcctttagctatggggctccagtctaaactacgtctaaaatgggtcatcctcatcgggtttgtcctgcaattagcgggaaccctcctgcttccattcggaaatagcaaggagcgctattggcgtttcgtcttccccggctttctactgggtacagccggctcggggctcatttacgccacaacgaacatcgcactcctggccgtgactccgagctcagtctcgggcattgtctccgcggtgttcagttgcgtcctgcaaacggggggcgcgacgggcgttgcgatcgtgacctcaattcagacgagtgtgcaaggctcgcacggtggaccaaatggtttcgcaggacgtgccgcggggctctggttcctcgttgctatgatcgcgacaatgatggtgctctttcttgtgttcatgaaggacacagtgggccccgtagacccgacggcaccgccgccgcacctcgaatatgagatgaatgagagtgcgagagaacagtctgcctga

SEQ ID NO: 301 - DNA, 252 bp, Ceriporiopsis subvermispora
cagcttaatatacccaatagtcagagcgtttggctgctgagtgcataccagctcacttttgctgctcttctcctcgtcagcggcagagtgagtgatctgtacaacccaaaatgggtatttgttacgggatccactggcatggccgtatttgctcttgtcgccggcttcatgcggagcgagattcccctcatccttttccgagcacttatgggtgcaggtaagacatcgcatcatgcgtggagctcggcctaa

SEQ ID NO: 302 - DNA, 1563 bp, Ceriporiopsis subvermispora
atgttcaacttactggactccgccaaaggctcgcacgcaacgacgttcctcgtcgcctcacttgttttcctcgtcttgaagcagttcttcacctcgcgaaagatggccaagcgagcaccgggtccgacgcgctggccattcctcggcaatgctctccaacttcctcaacaacagatgtggctgaccttctcggaatggcaaaagacatacggcgacattattcacgtcgacgtcttcaaccagccgatcatcattataaactcctcgaagatagcgaaggatctcttggacaagcggtcctccatctattccgaccgcccgcatctggtcatggccggtgatttagtgggctacagcgacccgtttgtcctgcaaccttacggagaaaagtggaaaaagcagcgcaaatttgtcgcatcagacttcagtcccgccaccatgccacggtattaccagctccaagagaccgaggttcgcaaactggtccgcaatgtcatcttggacccagattccctcttctcgcagactaaattgcggattgggacaattatcatccgggttacctacgggtactacatcaagggcgagcaggacccgttcctgactttgcctttgactgcgatggaaaacttcagcaaggcatcggctccagggacatggctcgttgacttcgtgccgcagatgaagaacatgccctcctggatgcccggcgcgggctttctcaagacggccaagaaatggcgcaagatcgtctgggatgcgtcctgggacccatacaactggtgcaagaatggccttgaaaccggagagacgctcatgccaaacctctgcgggagcgctatccagtccgccgcagatggaaagctctccaaggaggacgaggagcagctcgtatgggccgcgtccgcaatcatgggcggcggcctcgacacgaacatgtccgcggcgttgagcttcttcctcgcgatggtgctgcatcccgccgtgcagaggaaagcgcaggccgagatcgacgcggtgatcggctgcgaacggctcccgtccatcgcggaccgcgacgcgttgccatacgtgcgcagcatcatcacggaggtcctgcgctggaagccgcccgtcccgctcagtatcccgcactcgctcacgcaggacgacgtgtacgagggcatcttcctgcccaagggcgccctcatcatgcccaacgtttggcacatgatgcacgaccccacgtcctacccagatccctccgccttccgccccgagcgctacgcgggtgcggacggtgacgcagcgcagcgccgcgtgcacgagcttgtgttcggcttcggccggcgtgcgtgccccggcgtgcacttcgccgagggcacgctcttcgcgcttgtcgcgaccgtcctcgcgactgtcgacgtccttcctgcgctcgacgcgcagggcagggaaatcaggcccgacccgaagtactcgtctggtacgatcacgttcccggaggcgttcccggtgcggttcagtgtgcgttcggagcaggcggaaacgctcctagcgcaggttccggcgggtcctatgtga

SEQ ID NO: 303 - DNA, 1029 bp, Ceriporiopsis subvermispora
atggcgattcctaatgccacgcaggttatcgaagaacttccgaacctattcacgccgatggcgttcctccctccggacattgcctaccagacgactatcggcagctacatcctaattggctcactcggcgcatttgtgtgggacctattgaccaacctgcaaaacgactacaagttactattcaagtgcaggattggacttcctaccgcagtatatttcttgtcaagggtttcatccttgttctatgttctggccagtacaatctttgaaactgcgcccataggacgttgcgcactacttgagaagatcgtggatattatgtacccaatctccgtgtcttcgacctgcctgctcttcttctttcgcatccgtgctgtcttcgacagaagcaacataatcgtcgcattgttcttcgtcgtttggctaagcgtggttggtggcacacttaccatcgtcactgctgtcaagtcaatcaacattggaccgacaaactattgcctcaacgcgagcctaaagtcgtatgcgtcagctgcggggattaccccactcatacacgacacgcttgtattcgtcgccatttccttacgtctcctcatgaattccagggtggactggagacgtgactggaaacttcaggccagggcatttgttacaggtgaatatcttccggtgttctctcgtgcactcctccaggacggacagttatactttatgttcacggtcggcagcaacttactcaccgtggcaatggtgtacgctaccggtgtccctgtcacgtatcgcacgatgtttactgtacccaacatcatgctcacaaattcgatgtcgtgccgcgtcttccggaacaccaaattcggcttgttcagggatatctcaatgtccactatggcgacccacagttccatacgagcaggctctattcctctttcgctcagaaataatagctcgcgcggcgaaaacgacacgaatacggacatcagtggtactacggtcaaaatctcgaaggtcgtcgagtacgccacagtatga

SEQ ID NO: 304 - DNA, 7725 bp, Ceriporiopsis subvermispora
atggcatcaggtgttgctattgttggcatctccgtagagctgcccagtgggaactattccgaggagaatttagaccataattctttcttcgaattcctcctgaattacggcgaatcctacgaacggcttcctcgagaccggttcaatgtcgaagcttggagaggtaacggtatcgggcaaatccacgtagacgggggcacgttcctcaaggaaatcgactcgtttgacaacatcgagttcggagtttcgtcgcgagatgcacgcgcaatggcgccggtcaccaagaaactgttggagaattgcttcctcgcgcttctcgactcaggaatcgactatcgtgcacggaacgtgggctgctacaccgccggaaattcgttcgagctgtcaaatatcactgaaccagatgagtacgaaccgcaaggatcgttcgcgggatacgcggcaatggtggcaaaccgcgtctcgaaccatctcgacttgcttggaccgtccctacctacggacactgcatgtagctccacgctcgtagcgctgcatctagctgtacaggctgtgctgaatggcgattgtgaggctgccgttgtaggtggctgccagctcaaccatcgcctcatggattggatcacctatagtcaaggctccctgctcgcgaaggatggcaagtgcaagcccttcgacgcgtccgcggatgggttcgcaagagccgaaggttgtgtcgctgtcgtgctcaaaacactcgaagatgctctgcgggacaatgattatatttatgctacaattcttgggacagcgatcaataatggcggcgctggagcaccacctggggcaccagttgcggacgcccaacgtgatgctatgttgcaagcgtttcgtcgcgccggaagatgtcctaaggacgtcgattatatcgagctacatgcaaccgggaccgcgaaaggtgatcccacagaggccaattgggttggcaaagagttccagagggaagacgaggtgttgatcggcagtgtcaaggggaatatagggcacacggagataacagccttcctggcgtccttatccaaggtgctctcaattttgcaacgtggcaccatccctccaaacgtgaacctcaccgaccctaatcccgagatcaagtgggcagagtacaggctgaaggtaccgacgagcccaatgctgcttccccgccattcgcccaacacgcacctcgtctcgatggctggctcgggcatcggaggctcgaacggccacgtcgtcctagagggcccgcctctgcgagcacccgtgggtgcgcagcaacacctaaaggcgcgccgtccggtgctgctccttgctggcgggctcaccccgcgaagtgcagctgcagtagcggagtcgatcattgcgtgcatcgaaggcggcgaggtcgacgtgtctgcgatgtcgacgatcctcgggcgccgtgccagacagatgacgtggaggtcgtacgtagtctccggcggggacacatccaattcgatcagctttggcgagccccagcattgcccacgcaatgcaaatccgctcgtgttcgtcttctcgggtcaaggtccccagcacatcaacatggggcgcgaactcttcaagacatttcctgtgttccggaacagcgtgctgaacatggacaacacctacaagaccgccactggaaagtctatcatcgacgactggggcttgttcggcgggaactgctcaacagcactgccagatgtgtggccgatctccctcaccctgccagccatagcaatcttccagatcgcattattcgacctccttgtccatctcggcatcaaccccgacattgtcattgggcactcagccggcgagaccgccgtgctctacgcgtcgggcgctgcgccgaaggcaatgacggtcgaattggccgttctgcggggcgttatcttcacccaattggaacaccagggaggtaccatggccgcgctatcctgcactgcgcacgaagcgatgcagatactggaccaggcctgtgcgcaggagccggggtgcgcggttgagattgcctgctataatgcgccggcggcggtcgccatcgccgggcacatgcgcgcggttgatcgcgttgtagagcttgcgcaggcccgtgggatatacatacgcaagcttcctactcgggtgccgatccattcgtcactgatggatgcgtgcagggaagagtattgcggtggcttgtatgagctgttcgcacgttaccctggggcgcatgtcccaaagattctgacctactcgacgcttacgggagggccgtttggggggccattcgatgccgactacttttggcagaacacgcgcggtgaagtgcgcttcaccgaaacagtggaagcgattgcttcgtacggaagtcatactttcgtagagatctctccacgacctgctttggcatcctacgtccggtccatggcgcaagagccgaacattgtcctcaccaccgtgcgccggcagaggtcgggacaggacccatcggaatatcgcgacgtcctcgaactctgcgggcaactcactattactgggcataattgcgttgactttacggtactcaacggtcgagcgtgctatgaagtacaggtccctttaccttcttatccattctcgaagaagcgattcccgttgtatcctgacactgccggctacagaaaacagcttgagcctcgtcgaggacctttgaaccatagacatctccgcgtcaacaaggagtcacatccctcactgggtgaacatgtcattagaggcgagccgataatgcccgctgccgggttcattgagatggccctagaatttggagcacgcacactcatcaatgtcaacctgcaatctatcctgtcgctttctgcggaaaggccagtatcgttacaagttcgactccaaggctcattttggactgtatcatccacggttccaacgtccaagatctcctcaaatatagactcagatcatatcgaacgactacatgccgatggattcctttcctttgaagcagtaccaacatatcccgatctcgatgtatctggactccggaaacatcttcagaacaatgtcggctcagatttctatccctcactttcctactattcttcatatggtccgaggatgcgacgcgtgacgaacgtatactttggccgaaacgaggcactggcatcaatctgcggaatggatgacatactctccgaggatgccgcctatttcttacaccctgcaattctggatgcttgcatacaagtctccgcatacaagcctttccacggcaatttcgaccccaacgtttactatctaccagctcatgttgacgcagtcttcgtccatgagccacttaagaccagctattttcctgcccatctatacgctcatgttgaattgagggcgtggcatcccgaccatatgcgatacgacgtctccctcgtgaacgattttgggaagaggctatgtacggtcaaaggcttgagaatgacaaaacaccacatcaatccgttggcaagtgtctccggccctctggagcttgttcttcagcctatttccatcctatcacttccgacgacatctggaaggatctccactgcacatcaaaacacccagctcttcgagatatctgacgaaatagagctgcaccatcaataccgaaccaatggggtacacgactgctccgatgtccagtattggtgccatagccgtgacattcaagctcttaatctagagagtcaaagtggactctcctcacacgaggacacgaccggctccgtaattgaaggggtgttgcacaccattttgagccacatatccgatcaatcacatatacgtgtgatccgggtcttgatctctcgcttgcatcccataatgctcgaatctttcgctcaggtcttgaaggggttcccggctgtcttcttcgagatatacatcagctcggacgacacaagtgcgacgcttctagtagaagacttctcagggattgttcgcactgctgcgactgacatccagcgctcatttttcgaaatgatcttcacatcgccaaatgacttcccagaggcagtgatacagtcatttggtagcatgttagtacctggaggcgtgattgtatttgccgaaggccttcctaagcctctgggccacagatacctcagcctcgacaccgtccgacacgtgtcatcaacacccacactcccactcgaaacgctggagaagttgggtttttctgtggtacagccccatggccccgactgtgctattgcgcagaattgtaccgccgatgctctccaagccaccgaacccttatatgatccactggaagcattcgtattccaatacgaactcagaaacgaggtcgaattgcagtgggaatttagcgggctcaacattaggcaagagctggatgtctggatcctcgcttcggaaggaaaagatggtggatctgcggtgggaatggtacgggccctgagaagggagtattcatcgtggacaatccgccttgtcgtcttcccactctcgtacccggaagagatgcggctccaatgtcttcgccgacttcccacctacatgaaagaggaactagacattctcgtatcccgtacaggagacttcacagtctttcgattggcccctgtcggcaggccgccccatgatcacaatcctgcccgctggaacgacacgaccagtgatatcccccacggacatgttctcgtacatgttctgtattcgtccagccactacgatatttcagcattggtggcgtccgtagacaatgccaacaataccggtatccgagagggatccatactattggccatgattacaggtacccccggaacgtcgctcgtcttggatgttactatcacttgctcagtaccgccatctctccttgagcaagtatcgatggttgtgcaaatgatggccccgctcgtgacggctgtccttgctcccggtctagccgccttcaggtcgccagctcgtcttcgaacattacgaatcttattgactcatgctgatatcccatttgggcgaatcataaagagtatctatgcggaaaaggcgacactcactgaagtagtcgagaatatcactctctttgatctagcgtcactcgagagtcagccatttgacttgatcatatccggatacgacgatcacgcccacagtcaagtcctccgttccatactcagacccggccgcggaagactgtttttgtggggcaatcgtcaaggtctccgcgaactcatagatagagagctatacacagttgtggatgccatgaactgcgttcttcagtctcttgacgagcaaccccgcatcatatgcgaaaacacatcaattaccccttcattggcgccatccgatgtcatcgtgacacaagtcagcccacaggccatatccactggagtcaccttcagtgccgacaaaacatatctgcttgtaggaggcattgggagcattggagcgcgactggcactctacttgtacgagagaggggctcgacatattgttgtctcatcgcgtaccggggcaaggggccttcgcacaagtaacaatcttatggtgtatcgaatattcgaatatctcaaggggatcagcgacctggacatccgcctcgttgccgtagacgcatcttcacgacacgaaatgaagacgttgcgtgacaacatcaatccgaaaatcgccggatgtatcatcctcactgctgtactctccgaccgtgtgttccaatacctcgaggaagagcagtttactgccgttttcgctgctaagattggagttctcgatgctcttattgacacgatagacgtatcgagtctcgagtttctcgttgccttttcttccgtctcaggcttgttcggtgtcggtggtcagtcgaattacggcgcagcgaattcaactctagaggagacgatgtcagtaatctctaacgggttctgcttcgtgtgccctgggattctcgactcgtccttgatgctggctaatgggatggataccgagaagcatcgccttgctcacttcatagagtggtctatcacaacagatgaaatggttctgtggttcgatgacgcgatgacgagataccagggtggccaaaagttcagtcgttacatccccaatctgaattgggaggtgatggaccgcacgcacggaatgaacaaactgggagcacatctagttccgacgcgcacggctaaggcacctactacggaggacgacacaggtcgagtggcagagattgtcagaagcaccttgaatatatcctcagacgacttctccgcagaagtacctttcaccgcatacggtctagactcgctctccgcttcaagattgtccttcatgctgcgtcctatgatgagcgttacccagatacaactcctagcggatatgaccctcagagatctccagactagactgtccgccgaaccagtgtcggaggattttcgggccctagagccgaccacgggcaagaatgaaatacaagcgatgcgcgacatgctcagcaaatatacgcaggatttacgggaacaaagagctacaaccgacatccgagcgacgcgcaacgatgttgtcctcctcacaggaagcactggcgctctcggtgccaacattcttgctcagctcctcgacaacagcgatgtcacgaaggttttcgccctgaataggaaaggcactgatcgccattgcctgattgagcgacaagtggctgccctcgtgacacagggcctgccgcctacgttggccgaatcgcagaaactggtgctgatcgaaggagatttactgctggatggacttggtattccactagaggtgtttagtgagatgctatcctcagtgacacacgtaatccacaatgcctggaccatcgacttcttgtcctctctggaggcaatggaagatcttgtaaggggcacccgtcggctattggacattgctgctctctcgactcgtgcgactcctccatcattttcctttatcagttctattggcatttaccagcattattcgggttcggctccagcaccagaggagcccgtgctcgatgcgaagatggccgtacagaccggttacatggagtccaaatgggtggccgaacgaattgttcagatagctggcgctagactcgggctcaaagcgcacgtgattcgagtcggactcctgacaggaggcgtcaatggctcatgggatcctacacactggctcccagcgctcgtgcagtctgcaacgtacgtagggtgcctcccagaaagcgatagcctcgtctcatggatcccggtggacgtcgctgctgctgcggtagttgatctacgccacgcctctgatgatacactccatgtgattcaccctcgcccgatgctttggtcagacatcatggttcccatagcatcgctgctcgatgttccacttgttccctacatcgaatggttctgtcgactcgagaacatggccaacgcaatctcccatgcacctagtcagcgagacagccggcggctgaggcacgcgctcagacttattgatttttatcggctgggaatgcgaggcagtaagggagtttctgggtccacggagagcatgggtctattgccgcaagtgaaatgtcagaaggcaatgcgaagttctgcgacactgcagaatcccgaactatgtcaattggggatcagcgacatcgaacgatgggtgtcttattggcgacaagccggtcatctgccaaataatgactcgccaaactga

SEQ ID NO: 305 - DNA, 846 bp, Ceriporiopsis subvermispora
atgggcacggttggcacattcgatgcgattatcgatgtcgttttgaacattcgcgtgtggacatctatggacttgagcctgttcaacaagggaggctggatccgcctcatgaagaatgtcgacacagtggtaccgtcaatacttggggactgtatgctgatttatcgctgctggattgtgtatgatcgcaggtggaaggtcattgcaccctcatttatcctgagtgttgctggtattgtactcggcatcacatttgtcgtcctctccggagtcttgcagtcgccacttggagtcaacaacccagctttagtgccattcgttggtgctgcgttggcgctgactgtgacagtgaatctcatcacaacgtgttcgtcttcaaatagtctctgcgcgctaccagagctcacaacagagtctggtactacagcactcatcgtgtttcgcatcctacaagtcgaccgaggagtccgaatatttgtcactcgaaacgacaaactcgttcacttcgctcgcatcatcatcgaatcgggactcttgtatacgctatcggcagttatcactctttgcacgggagccaccactagcaacgccgactacatcacgagtgatgcgatggtccaaattgctgggattgcattcaacttgattataatccgcttcgagaagaacctagcggatcaggccgcggttgaactgcagtttctcgcatcatctagagctgcgcacaccattcctccgttagcaggcggggacagagtgattgatatcactcataccccaaagaataatggcctctttgatgataattttggtgaggaagggaatacacgagtctgtactctgtga

SEQ ID NO: 306 - DNA, 786 bp, Ceriporiopsis subvermispora
atgcgttcctccactgttaccgctctcgccctcgctgctatcgtcgcgcccgttctctctgctcccgccctccctgttcgcgacagcattacggtttcggcgcaggatgtcgagcagtggacagaggagacactcgacgccgcgaacatcccggtgccttccaccgctgtccacgaggcccgcaagttgtctcctcctcgcaagacccttgctcctcctaagccgaagccgtccaccgcaacacgcaatgccagcggattctctcttcatcacaagtccccccttgctcctccgaagcctaagccgaggcccacggccacgtcgcctgctcctaagtttcacccgacaacggtgcccctggctcgcgacagcgacagccacagtgacgctcccgctccttcggacggtagtgaggccattccgatgcagcagctcgagcagaaggcctcctccgcaacacacattgctcgcggattttctcttggtcacaagactccccttgcaccgcctaagccgaagcccacggtcacgtcacctgctcctaagtttcgcccgtcggccgtggccctgcctcgcgacagcggcagtgacgctcccgctccttcggacggcagcgaggccatctcgacgcagcaactcgagcagtggggtgaggacgccctggacattgcgggcgcagtcgcgcccatcgctgagttgttcctccgggaccttcgcagggacgagcagctggcggcgctcgtgatggcgcaccagaaggctcagagcctgaacgaccttgattaa

SEQ ID NO: 307 - DNA, 1824 bp, Ceriporiopsis subvermispora
atgagcaatgttgaggcaacatcgactgacacgactggcacggttcacgaactgaagcaacctgactgggcggccgcacgagagctgagtctccgcccaggaggattcggtgctaaacgagtagaactatggcctcaattgctgaacgtggaacacccggcaccaaagacgtccgagctgcgagtttctgaaccgtctgcatctgcaccagacgaagcatctcatgaatcagacgaggttgataacgaaagcatcagagacacctccacgatagctccgcacaaggatgaacgtcagatacagctggacactgaccggagcttcgtgctgtatcccgtagacgacacggaggaaaaagatcatctacagtcgcagctgaacgaactcatcgtctgcctcttccgcaagagacaacatctcagttacttccaggggtaccacgatgtcatctctgtggtctacctcacgctcccacgagagttgcaattacccgttgcagaaaagatcagcttgcataggctacgcgactctatgggcgcgagccttgaaccggtagtcggtttgctccgtattctgaaacggataatgcatcttgcagatgccgaatttgcgacaattctcgaacggaacgctccccttccatattatgccctgtctagtctgctcacattactatctcacgacgtccctactcttcctctcatacaacatgtcttcgattatctgctgagtaggcctccaattgcgctggtgtacctcgccgcagccgtcattttgacacgccgagaggaggcgataatgctcgagcgggaaggcgaggaaggcatgattcactccctcctcaccagtcttccggacttgtacgaggaaacggacgaagagtcgaaggatgaagacactggggctcccccaaaaggtgatggatcgatatctcaggacgaatcgtcagcccagcaatcggcaccagagggagctaacaacgttcctacatcggacggcaatgtcccgcaggaccctgtcgagcggcctcatgacgacactatgccgtcgagtattccaaacatcaaggtggaggatgagggagctgcagatgcatctcttgaatctcagactattggagaaagcgacgtcaagaccgaagctccatcagaagcattgttccagtcggcaccagccatcgagacgggcgacacccccccattctccgagaaacacgaagaaacagcacctccttcgccaacgctttctatccatctcacctcgcgacctcgcatacctctcagcagcctcctgcgccaagcagacgacctctacacccgtttccctcctactcaccctgaagtggctgtctcctccatcatggggccgcagagcgtcatgcttacatggtccgaggacccatccgagctcccagacgacgaagaggccgagcgcatggtgctccgacccgagctcatcgtcctgccccacatcgatcaggacgaagaagtgccatcagacgaggaggacgagaagtccactcggtccagaaggagaggagggaaggaccgcgagcgtaggcacagacgcaagttgcggaagccccgccgcatgggcgatgttgtcctgcagcgcaagaccatggtcgcgggtgcggtgctcgtcctcggcgtcgcgatggccgtgtatgggatacagtccggcggagcggcgaacatctttggtgtcgcgggcgaaggccaccgccgccaccagcttgaaaaggagtggagacggttgagcggatttatcgggggagcagtcatcggagtgggtgaacggatgtttggaggccttttgcattga

SEQ ID NO: 308 - DNA, 8259 bp, Moniliophthora roreri
atggtttcaactccatcctctgccattcgccccagctatgccaccactgactctcatgccatggccatcgtcggtacctccatcgctgccccaggcggcgtcgacgatggactagacactgaggagttctatgagttcctcaaatctcgtggctccggtatcatcactgtacccaaagatcgctggaatgctgaagcttatcatggcgctcaacctggcaaaattgttactaccaaaggtggttacatcccaaacgctacatacggagacacgcaagaattcggtatcactcctgcagaagctgcccagatggctgtttctcaaatagctttgcttcaccacgccttcaacgctttgcaacgcagtggagtcgactaccgaggcacgaacactggcgtgtatgtcggttgcacgactggtgcagcaccccacaacgtagacatcaccgaagccggagcatactacatgaccggtagctcgatatctatcaatgcgaatcgtatcagctacgttttcgacctgactggtccttccttgccagtcgatacggcctgctcttctagtttgaccgctatgcatctcgctgtgcaagctgttaggaatggagaatgtgaccaagctgttgttgctggagtcaacatccttctcagtccacttgagactgcatccttcagtcagctcggagtcctcggcccagatggtatctcgaaagctttcgatgaagatgcaaacggttacgcgcgtggtgatgttgtcagtgccgtggttatcaagcgtcacgatcttgctgtcagggactatgaccgtattctggccactctcgtcggcactgctcttacgtcctgcggatccttgatgggatctctcactacacctagccccgatgctcaaaccaaggctattaggaatgcctacgccgatgctggtctaacacccaaccaagccgacttcgttgagttacacggtactggaactatcgtcggagatcagtacgaggccaatacggcaggcgcatgcttctctgacggacgtgacggtcgagaaatcgttatcggctcagtcaagagcaacgtcggtcacggtgaaatgggtgcttatatgagctctttggtcaaagttgtcatgatgttggaacgcaagcagattcttccgaacggatacttcaagaagccttcttcgaggatccaatttgacgagtataagctgcgggtacctatcgaagtcgaggactttgttccctatgacgtcgagcagggtctcatcgcgtcgatttcttccttcggattcggaggatcttgtggtcacactgtcctgcgagaacacgatgttaggcccgtcctccctgactacgaaacgctaaactcgggaccatatctcttcgccgttggaggtcttactcctcgttcagtcaacactctcatcgagagctacaaagccgagtacgcggatgtcgaccctctatccctatctgaacacctcggctcgcgtgctcgccaattgagctggcgttcattcgcagttgcagattccttgggccaggcaaagttcactgaacctgtcatggtctcaaaacgtgctgttcctttgatcttttgcttctctggtcaaggccctcagcactggcaacagggtcgcgaactcttctcccgatactctgtcttccgtgaaagtatcttggcttccgacaaaatttacaccgagtacacaggaaagtccttccttgaaacctccggcctctttgtccccaaccctcctgcgaactctatcctcgccaagtccctttcatggcccgcagacgccatctctgtttccatcactttcttccagatcgctcttttcgacctttcgatctaccttggtctcaagcccgacgccatcgttggacacagtatcggcgaaactgctgttctttatgccagtggtgctatgcctcgcgagatggtcgtcaagatcgccgttgctcgaggtgctgctcttcgcctcgttgacaacattggtggagccatggtcgctgtctctggttgcgacctccgaacagtccaagattatgccgaagcagtcgttgacctttccaacaacccgacggcgggtgttaccgactctctccacgtggcagctcggaatagcccgaccgactttggtctctcgggtgctgagtatctcgtcgacgaactggccaagtatatcgaccaatgggtctctggggtctctgctcgcaagcttcgtgtcagcactgctgttcactctccttatgtcgatgcttgcgaggcccaataccgtcaagagctcgctgcaatctttgaagcacaccctggtacccacaagccttcgcttccagtgatgtcaacagtgacagccgagttcgttgagaaggagtacacaatcgactacctctggaacaaccttcgtcaacctgttcgcttctctgatgctattcccaagctcatcgagaagcacggtgaaaacacgaccttcgttgagattgctcctcatcccgtcttgtctcaatacatcaagcaaatgggtgccttcgagtcggtcgcgggtagcaaacgtcctccttcggctcgtcacatcaaggctggtcaacgccctcctaccgagctcgatgcactgtacgaagggattggccagctgttggcttcaggtgtcaactcggtcaactttgcactccttaacggttgtcctccagagaacttccttggacctaagtacccattccaaatgaagtacttcccggtcgcacctcgtgttcccagctatgtgcgcaagctgctccctgccgagagaccgctcaacagcgaacggctccgtatcagcccccatctgcctgaagattggatggctgatcatgttatcgatcactcgaacctcattcctgctgctgcgtatcttgaaatggctctcgagttccctgacgtcacttcagtctgggactgccgtttcgagtctgctttcattctcgatggttcggtgcctgccgcaaccttgaaagtatctcgggacggaaacaggtggagtgtcaaatcttcaagcgctctccaaagcatgcaaggcgacctaacatggacccgttctgagccgtccttcgactctatccatgcctacggcaagcttggatacggcaagccggagttaagacctggagctatcacccatgttgatgttgatgctgtgattgctcgctcgaaagtacaagcttcgcatgaagcactttacgatgaattgagtcaagttgcccaatttggaacagagttccgacggctccagaaggcctacgccaatgatgtggacggtattgtttacattaaaggtcacggtgacagcttgactcgtactgggtacacattccatcctgctctcatggatgcagtattccagtccggtgtctgttttaacatggtgttcgatcatgtcaacgtcggaaaccctgagcgtacattcatgctgccacactccttgcgtcgcggatttaggaatgatggaagcacagaaccgcttatcttcaacggtgacttccgtatctacgctatcctggctgattggtcgccgtactcggcgacatatgactactatgtgctgaacgacgataatgatgtcgtcttcacttttgaaggcctgcgtttcgaaacggtgcagcaagaccaacaagcaatcaaagaacgtttcagcatgatttggcaaccccgtggcttgcccaagtcgaataacagtggtcatgttacacttgaggatgattcggttttggaacaccaagagttgcttgatgttctagacaagctcgccttgggttacaccaagaaggctctagggcgcctttctcagaacttcgaaacggctctgcctgaccgtaaacgttacatggaatgggcactcgagcgaactgcagaacgggctactgaaaccttcttggagttgagcgatgtatctccggtgatgaggcagaagtatgcttctttgttcgaactcacgcagcgagtcggagaagggcagacagacattttcgtagattcaaaggctgccgtagacatcctcttccgagatgacctcatgagccgaatttacgagcatccacctttcatcggcagtatattcgacgaaactgtcaagcaattcgtcaagctcgtcaaggatgccatagaagccggcaaacgcgttgttcgtgtgctcgaggtcggtgctggaaccggtaggttcacggctttgctcggtcaagctcttctagatgcccagttggaactgtgctacgtcgactacgtttgcacggacatttccatttctcttgctcaggaggccacagccaagtgtccctggatgacaattgtccctgttgcattcgacctcaacaagccacttgatcaacaaagtatcgatcccgcgagctttgatattattgtcgcattcgatgtgctccacgcgacaccaaacattaacgataccgttcgtactctccgtgagctcttacttcctggagggcatcttgcaatcatcgaactggatggaaactcattcgccactggtgctgtcggaagcatctggatggattacgtctttggctctttctcagagtggtttggtgttttggaacagcgtccggcctctcactgctctctgagcaaatcagagtggaacagcgtcctgcattccgaaggattcgctgaggggctcttcctcacatcaaccggggctactgtttctcatatggcattcgtgtcccagaccactgagacggctcacgaacaacaaagctctccaactccttctactccctcgctgcaaagcgaccacagtcctcatcttaggtcattctctttctcctcaacgcccctccccgttacacccaatactcctggcttcagtggagatccaacccgcagtgtcttgtcaatcgacaacgagcatcaactgtcgaagaagttggagggtggggccacttccgctgacaagcaatcgcagatcattgctccaggcccaatcacacttgaagaccaacgctcgtcgtctcaatctccagagctgtcactacctcccaatacaatcattcgtcgattcacggctggggatgaggtcgagttagtcagcttcgtcgctagtctcgactcctcccttccgttgaagatttggctctacactgacacacagagcgacaacgctacgctgatcggactgaccagaacgctcaggcatgaattcggtttctggaaggtgtatcttatcctcttccatccttcttggagctttgccaaccaagaagagttcattcgtaaccagcttatccctcttaagtggttggacgcggaaatcatggttgatgaggatggcaccatgcgagtgccacgtattgtgacaggcgctgccccgtcaaccacggagatggctgattccaagccactgcaattcgatgactcccagttttggcgagcgctccctgccccactgaatgcggatgatgtccaagtcgctgtgtcctttatcacactttccagtgtaattccaggtcattccgagttctctggaaaagtcaccagtgtagggtcagaggtggaaacctctttgattgggaagcgcgtgatgggtgtcaccaagtcacctaaaggcaactttgtggtttgtcctaaaggttgcataacgacgatcccggatagcatgagccttcccctcgctgctgctcttgccggccgcctcgcattcacatcttcagttgtggccgataccttggcgaatgccaaaggtggcgttcgtgtaattctccacgccgctgactgttctccagctgccgtcgcaacatacatctatctccaggagcgcaatttcgatattttcgtgacagcagcgaatccgtctacacatcagattcctcataaggaagttttcgactcaggcaatgttgagatttggtcgcatgctgcacgacaatgggctgctgaaggtgccgacttcatcttcaacttcgaagatggaactgtagtccttgaggaatcgattgagaggctagctcgtcgtggcaccctttgccaagtcggaactctctatcctcaccgcctccgtccaggtcagcgattcgtatctgttgaatttgactgtctattctctggcgaacataacgttctggaagaagccattcagtcaacttccagtcagactatttctcgtatttccccctcaactctcatcttccaggcggatgctctccaattggcacactcaaaagccagcctatacaaggatctctcgattatgttggacttcgagacgttaccgaacaacatgactgtctccaagcctggtagactgcgtggtacgaatacatttgaccctcgtgcatcctatgtcgttatcggaggcatcggtggtcttggaattgagattgcaagattgctgatcgagaagggcgcccggcacgttattctgacatcacgatcgggtagcaaggcattcgacgatggtcggcttgttcgggagaggagggtcctcaacttcttgcgcgagaagcccggggttactatcgacctggttgccgtggactgccttgatgcggcaaagacgaaaactcttttctccaacttaccgaatgtcgctggtgtcttctacgtcgccgtgagattaaacgactcgctattcctcaatctcactacccaggaagactggtcaaaagtgtacgatgtcaaggtcaagggtcttcgcattctcttggatgctgttgatcccagaaaactcgatttccttgtcctgacgagctctatggcaaccgtcagcggttctcccggtcaagccaactatgctgcagcccagaccgaaatggaggcgatgggtgcaaacattcccaattgcatttcagtcaccgttcctcctctaaccgacggtggtgtctttgtacgaagtatgcctactggcaatgctcgtaacgcggctctcgacaaatataaggatctcggcatgactggaatgaagttggcccgtcattgcgtcgatgctatctggactattggaacgccagcctaccaaccagtctacattcccgcgaccaactggaagaaggtcatggaggtcgctgctcctgaataccttcaatctagtatgagacacttgttggtcaaagagaccactgacagtgtagcagccgacggcggcaaagaacaaaccattcttggagcctgtgcggctgtgctatcgcttgacattgaccgcgtcgaagataatattcctctcgctagctacggcttggattcattgacgtcggttcgcctcagtggtgttctcaaggctcgtttcggggttgaagtcacacagctgcagttgttgagtcagactatgacagttgcgcgcttatgtcagctccaggaggaacaacaagcatctgtcaccacaaccgccaccgccaacgatgaccgcacccaagtcgatccggccaaggtgcatgaagcggatatggatcaaactattgtgcggctcaacactccaaccgaaggcactcctctcttcctcattcacggtgctggtggaggtatcgtcgtacttgtcaaagcagcccagagggttcactatcctgtctatggtgtgcaggatactccagaggcacccatcaccggtaatctccgccgattgtcagaattctacttgatgaagatccgggagaaacagccacacggtccttacagacttggaggattctcattcggaacgtgcttggctttggacatttcccttttactgcaacaacagggcgaggttgtcgaatcattggtgctcttggatggttcgcctactctcttcaagcgacctgcattccagtcatatctcatgggacgcatccaagacggcagtttccaggaagacatcctcgatgtcgtcaacgacatggcgtctagtggaacgctcgatgacgcggaggatttaggccgtcagtttgctgaccacttccagcgtgccaaggaaggtggaagtggaccaaaatgggtcgctcgcttctgcactgcctatgtcgctcacctcattatgggtcttcgttgtggtaaagagttcaacgctttagaggcgaaatacggaaaggatgcgatgggtgcttggccagcaaagaggaccgtgctcgtgcgtgctctcagcggtgtatctgctgaaccttatgcagccggtgcttcggagtactttgacttggacgtctatggctcaggcgtggagaagcatgacctgcctggcacgcacttcggcatccttgcacccaaatccggactcgacgccattctcgacaaactgcactaa

SEQ ID NO: 309 - DNA, 1881 bp, Moniliophthora roreri
atgtctgttgcaatgccggatatacccgctgaggcctattatatttacggtcacaagagatatctcgttgcgcttggactcgcgctgaccctctttatctctgcgttggactcaactatcgtcgcggtcgcgttacccacgattggcgcggactttaatgagtatcagcaaaccagttggctcgttacctcctacctgttgacctacacggcgtttcttccagtagtctccaagctcacagatatcgtggggagaaagccagttctgattgtatccactctgttctttatgttatggtccggagcgtgtggaggggccaagtcaatgacacagctcattgtgtttagggcgttgcagggaatcggaggttcagcaatctactctggcgttgtggtgacgatcagtacgattgttcctagggagaaagttggtgcatacacacccatcattgggacagttttcgccgcaagcagtgtgtcaggtccactcattggtggtgcaatcgttcagcacgtccattggggatggattttcttcgtcaacttacccatcggagctgttgcatcatctttgttgttctacgctctgagtgatccagatctcggccctatgagcatccaaaagatcagtcaaaggatagattggataggcagtttcctgttactggctgccagtgttctcctcgcgttctcgctccaagtcggaggtacagacggatatccatgggtatccgtccaagtactcgccccgctcatcatctccttctgcattctaccagtcttcgcgttcgtcgaaactcgtcacccagaacccgttattcctttacgtctattccgagtccgcaacatctgctttattttgattttcacgctggcattaggagccggtctgttctcgcatgccatcttccttccgcagcgcatgcaggtcgtagatggtgtttcacctgtcaccgccggtgttcgcatgctgccccttctccttcccgttggatgcctcagtcccttcgcaggcgccatggtcatgctgaccaaaagttaccgacctctcatgtggttcgcctcgtccatcggtgctatcggtgctggcctattgtccactgtcaccgtcccaaccaagttttcccatatttacggattcgaagccatggttggcttttctatcggtgtcaccatcaccgcgtcgaccttgatcatccagttctgcgccgagagacgagatttggcggctgctacgggcctccagacgttcattcggcaattgggtggattggttgcaattgcaatttcgacggcgattctaaatgattcggtggaaaagtctctcggcagtaatgcgcgattggccagttctccaggattgcttgaaggcattttgaagagcccgactagtgtattaccttcgctggatccggcaacgagcctcatcatacgacaagcgtatagcaaaggtttctctgtaacgtttatccaggccagtgcttggttggctgtcggagctcttgccacttttgggcttgtacattatctgcctgataggtttttggacgacgagcagaccaagggagaggttcttgatcctgagaaggctggtgcaggctcgattgacaataccatcaagactggagaaacatctggagttgcgaacgaaccggatgagccgctaggtaaagagccggcaaaggttgaagtggttgatgctgagaaaactgtagtaaactcgggtggagttgcgcacaacgaaccagatgaaccgctaggtaaagagctggcaaaggttcaagtggctgatgctgagaaagctgtagtagactcgggtgaaaaggccgctgagacaggggaaaggaacgagacggaggagaccacatcccaaaagttgtaa

SEQ ID NO: 310 - DNA, 1569 bp, Moniliophthora roreri
atgaaccggacaacaaaaaccttacttaccacagcttgcatacttgtatgccttactagaggtgctgtatctcaagctacatggaacgagtcgtcctggttgtctatcacacctactcagaacttgacctgggtgccatgctacgacggaggccttgaatgtggtcgcttccaggtcccattgaattatgccgacccagaaggacaatctgctgccatagcactcgtgcgcatgaaagccaacgtctctgccgatagtacggattatcttggtcctatcctcttcaatcccggaggacctggcggtagtggtgtcgactatatagtttcgttgggcacaaaattaagagaaatcttggggcctcagttcgatttagtgggattcgaccccagaggtgtatcgcgctccactccacgcgtgacaatctatgaaactcttgatgagcgtctgtcatggcaaaggtctggaatttgggagctcaactcctctttgcaagacaatgttgcgagttattgggctcgtgcaaagataatcgcccaacttgctgaagaacgtcatggggatttcctgccttatatcaacactgaccacacagcacgagacatgcttcgcattacggaggcttacggtagagagaagctccagtattggggcatctcatatggcacggctcttggttcgacctttgcagctatgtttccagacaaggtccaacgcttggtaatcgacggagtgcttgacgttcaagatgactactacaccatgggatggaaggatgtcgtttccgataccgatgccaccctgaagtggttcttcaaagactgccatgatgcgggagcagaaaaatgctccttctatgagtcgtcggccgaagccatcgaagaaagactcaacagattataccagtccattatccgagctccggtaccggtacgcggcgctggcctcattgattatgcatcactgcggttcgtaatattcaatgcgctgtactatccattgacccggtggtccactttggcaactgccttggccgacttggaaaagggaaatggtaccacgttggctcagatgagcgggctagtgccatcatcttcccccgattcagacgacgctccggtgtcttttgcaaacaacgatgagtctcagactgtgatagtctgcaatgacggtgacgctgtgccacctagcctggaacatgcacaacagcactatgaggagtccctgaaagtatcggaatggggtagtatgtcatcagccatgagaattaaatgcagtggttggcccaacattccaaaggcgcccttcagaggtcctatttcgggaaacacgagtcatccgatcctcctcataggaaatactgctgatcccatcacacccctctctgctgcacacaaggtttcaaaaggtttccccggatcagtcgtgcttcagcaggattgcgctggccatacttcaatcctggcagggccctcggtctgcacctataacataattcgcgagtattttgtcaacgggactctcccagagccaggcactgtgtgccctattgaaggatctccgttttaa

SEQ ID NO: 311 - DNA, 1848 bp, Moniliophthora roreri
atggaacaacctgcaaaacgtcgtcgcattcagcgctccccctctccgacatataggctcgacgacgatagtaattacgaaccgtatatcccgatagcccaaagacgacaagcaaagctcgcaaaactctcatctctgggtgcttcgacggagagagaccggaatagcaagcagagagaggaggaggaacgcgaagaagagaaccaggaagaagaacgacaaagagaaaagtcgaggaaggagagaaccttactactagaagctcaagaggtgcattccaagaaggccgctgaagacgcgaagaagactcaggaggaaaaggcacgggaagtggatgaagagatcctggaggctataaagattcgcaggaagctagcttcagacagagagctggccaaaggcatacaatataccgaatctttaaaaactagctggcgacccccaagatatattcgcgaaaagacaaaggaacagcacgaacagcttcgcgagaaataccatatcattgtagaaggagaagatgttccgcctccaatcgaacacttcagcgacatgaagatacccgactccattttgcagcatctcaagtcgaagcgcattacaaaaccgacaccaattcagcttcagggtattccgacggccttcgctgggagagatctcatcggaatagcattcacaggttcagggaaaacgctagctttctgcatgcccctgatcatgctcgcaatcgaggaagaagccaaacttcctctcgttcgaggcgaagggcccgtcggtgtcatcctatgtccatcccgagaactagcaaaccaaacctacgaaaacgtgctcacatggaccgacgctctcgctcaggacggcaaatatccacggctgaataccctgttatgtataggtggcatttccatgaatgaacaaagccatacattgagcaaaggtctgcacattgtggtggctactcctggaaggcttatcgacatgctggaaaagaagcgttttacatttaacaactgcaaatatctttgcatggacgaagccgaccggatgattgatctgggttttgaagatgatgtgcggaatattatgagctttttcaagcgtcaacgacaaacattactcttctccgcaacgatgcctcggaagatccaggattttgcgcaacaatccctcatcaaaccggttctcgtcaatgtaggccgtgctggtgctgccaacttggatgtcctgcaagtcgtcgaatacgtcaagcaagaagccaagatggtgtacttgttggagtgcctacaaaaaacacctccaccggtaatcatcttcagtgagaacaagaatgaggtcgacgatattcaagagtatctattgctcaaaggtgttgaggccgtagcgatccatggttccaagagccaagaagagcgtcaatacgctatcaagtccttcaagtcgggtgcaaaagacgtcatggtagcatccggcgtcgcctcaaaaggactcgacttcaacgatattcagcatgtcatcatcttttcgatgcctaaagaaattgaagactacgtgcatcaaatcggacgtacaggtcgtagtggaaagacgggtattgcaacgacatttgtgaatatgaatacaccggagcagacgttgttggatctcaagtatttgcttatggaggcggggcaaaaagttcctccgttccttgctactattgaggatcctcgtgctgctcaaggcggatcgttgaagggatgccccgtttgtggtggcctgggccatgggattagcaattgtcccaagcttgaggagacacagaggaggcagatggcgtcgcatcgtacgactgatgatgggggctactga

SEQ ID NO: 312 - DNA, 1248 bp, Moniliophthora roreri
atggaatcagtcagtcacctcccgtatttcttccccgacgcacagcaacagcccgagccatcgcagccgaacaccagtcgtcgtggctctgttctctcttccattctctccggaagcggttgcgtatccacttcgtctgcctccattcctccatcggcatctgggcccaaatgtggtgtgaagcgatcccgtgatgaaaccaaggacggacagcctccatctcgagacagttatctggtcattccagagcccaagcgccgtagaatccagacagatacagatttcccgcttccattttctaccacatcggcacacacagagggaaagcccacaagcacaactacctctcccccagccacacctccagagcttccttgccgtgactgggcaagcaaggttgcactgggtctctggattggtgaatatctgtgtgacagattttctacgcctgagttcaggtttgtcgaaaatcatattatcatgaaggaaatgagcgggaaactcgttagcgtcttggactacctcgacccgcacaactcgatcgctcttgccgctcttatctacctggagaggctcattcgtggcatcaaaatcggcgaaacatttagtgatcgcgatcgcgctaccatcatgtataggtcatacctactcgctctccactttgcctttatctggctagaagatattccttggtccctctcaaagatcgctgaatgcatggaagtctctctggaagacgcgagattgtgggaacaccagggtctctcattgctagactacaatctcttcattgcagaaggcatttggcccgcatggctggacatgcttcataaacatgccgcattcacggaatgtcatgaccacattggccttacgttacaagatatcttccttacagccaaggatgaatacagggcatctgtccagcacatccaagcaccttctccggcatcgtcaccatcacttccatcaccacctcacaccccgccgccgtctgctcttgctccaaaggtagcaacgactactgttcgtgagttaccaaccccgcaccctggccgttcgtcatcgctcgtcaagtcgaaggaagattgggatagtggttttgagttttccactgccagccttgagcatgcttctgctccagaccgacagccgtctctgttcgacgccactcttcctattctgcagcccaaacctgttcttcctgcccaccaacacgttgatagcttgctcatggcggttgcctag

SEQ ID NO: 313 - DNA, 1947 bp, Moniliophthora roreri
atgcttggtgtagcacgcgccggcgctcgctctcggcagaatttatttctccatcgttcgtcacgaaatccctggacaattccttcttcaactcggcatgcccggttcaactcaacttccacggaaattccaccacctaaacctcgatctaccattattcgccgggcattaaccgttgcaaaagtcactgcttatgtcggtctatcttcagtctttggccttgtcgtcgtaggtgctgggatattcattcacgacgcgtttacctacaacgaacgacacgtggaacgggtaccagtacatccattggcgttgcatccagagcgaggagggcccaagaatcttccgatagtcaaagtgcagatggatgaccaggaggatgaggagacgaggaaattggctgagaaaccaaagttggttatcgtcggtggtggttggggggctattggaacgctacgaacgcttcatccaggagactaccatgtaaccgtcgtatccgcagaaactttcaccaccttcacgccattgctaccctccgctgctgttggtaccgttcaagttcgttcacttatcgagcctattcgaaagatcattgcccgtctgcgcggacattttgttgctggaaaagctgtggacctttgcatcaaggataaactacttgaagttgaaacttggagctctaatggcactaaagagcgtatatatgtcccttacgaccacctcgttatcgcagtcggatcgacctccagtactcacggtgtccccggcctcgagaactgtttccagctcaagaccatctcagatgctcaagctatgcggagacgcatcatggacaactttgaaatcgctagtctgccgactactactcctgaagagagaaagaggctgttgagctttgtcgtttgtggtggtggtcctactggcgttgaaacagccgcggaaatatatgatttctgtcaagaggatatcatgaattacttccccaagatctgccgagaagaggtttccattcatgttatccagtctagagaacatatcctgaacacttactcggaagccatatcaaaatatgccgaggagaaatttgaacgcgatggtgtcaatctcattacgaactcacgcgtgagcgccgtaacgcctacacaagtcattttcacagcgcgagacaatgaaactggtcaaattactcaacacacggtccctaccaatttcgttctatggtcgacgggaatagcgatgaatccctttacaaagagagtcacagagttgctacccaatcaagtccataaaaaggccattgagacggatgcgcatctacgggtgaagggtgcaccggtcggagagatctatgctgtcggggattgtgctacgattgaaacttcgctcgtgagccacttcatggaattggtggacgaggcagataaagacaagaacggcaagatagatttcggagagtgggaagtaatggtcaagaggatcaagaaaaagatacccatggctgagaaccatgtcagcaaagttagagaactcttcgagatgtatgacacagattcggataacagtttaaccctcaacgaactcgtccggttgttggaagacctcgggaacaagatcaccgctttacctgctactgcgcaggtagcttctcaacaaggcaaatacatcgggaagaagctccacaggctcgctcggcaaagagagttccaacagacaagggcaatggatgttggagggacgccattcaaatatcaccatctgggcatgttggcatatattggcaacgctgctgtgtttgatttgggaccttggtcgttcacgggtggattggctgccatgtacgcgtggagaagtgtatattggaatgagcaagtgtcggctaggactagagcgttgttgatgattgattggattattcgtggtgtgtggggaagagatttatctagactctag

SEQ ID NO: 314 - DNA, 1392 bp, Acremonium sp.
atgtcttccttcattgcagagtgggccagagctcaggcgcctagagcctccatgtctagaccttcgtctgtgttcttgcgtaaccttgaagaggagctggacactagaaggcaacaggacgcactgatgatggtacataagagaggtgatgccatcgatttctcttcaggcgacatgcttggacttagggccacggatttgctgaggacaggcttcgtcaacgagcttgagcaacatcccaacttccacatcagcagcggaggatcgagattgacggatggcaactcagatgctctggaaagtttggagcaggagcttgccgagttccacgacgccgaggctgcattgttcgttctatcaggtgccatcggtaacggcgccatcttctcggtcatacctcgtccaggcgatgccattgtgtttgatgagttggctcacgccagcattcttgacggcatgaagaatagtcttgcgctatgtaaaaagacattcagacataacagcgtcgagtcctttagaagcgcgttggaggccgtcaggagaacacaaccacaaatagctgacggttcacacagcgtacttgttgctgtagagtcaatctacagcatggacggcgacacttgccctctgaaagagcttgtcgatgtggccaaagacatgtttccaagtggcaacatcgagtttgtcgtcgacgaggcttggactacgggagtcgtgggccccagaggtgcaggtatggtcgctgctctgggtctggagaaggacattgccattagactacatacgtgtggcaaagcattggctgctgctggtgcggtgataatctgtcacaatacagtcagaacgatgctgctgaactattcgagggagatccactactcatattctcccagttttccaataatagcttctgctagagcggcatactcattgatgaagacgggtcagactcaagaggcacaagttagagtgccatatttggttgagctgttccacgacacacttggttccaacccaaactgggacgaagccaacgatttgggtttgatcagaagtgctctttatgatgagtaccaagtctccccaccatcctttgtatcttgtatacagccaatccacactcgtccaggtcatcacttttatctagcctttcatctgcaactggcgggcttttcagttttcccaatatcgtacccagtagtgcccaaaggagcagatagagtgaggattattatccacgcatcaaacacagatgcgcaagtgaaagctctggcagattccatctgtgcgtgggctcaggagatgatcgagattgagaagagcggtacgaagacgagacttccatctgccgcacaccaaaccattgctctgattacgaacggttcggtctga

SEQ ID NO: 315 - DNA, 1716 bp, Acremonium sp.
atggctcttgcacacttttcgatttgggccgtcctgattccaattgctatctattccctgtatctgtggcttctaccaaaaccaatttctggaataccctacaacgaggaagcgactagaaaccttttgggtgacgttggctcgttgacaaactgggagaaaaagaggcccggcgaaatctatacatggctgttggatcaaatccatcgtcacaagtccccaattgtgcaagcattcgtttatccttttggcaagccatggttggtggtcgccgattatgttgagactgaagatgctctgttgagaagaaacgatgactttgaacagtcagagacgcaaatagtcacgttcagacaggtagtccccgaacaccacatctctttccaaaccaatgccaaattcaagcgtcatagacagatggtccaagacttgatgacgccaacctttctgcatacaattaccgcaccattactgcacgcctgcttcatggaagcaatgcatttgtgggagatcaaggcacaactggcccaggatcgtccattcgaagccaagacggatttgagcaacagcgcattggacatgacctgggccgcgttctttggtagagacacgcccatccagcagactagggccaacatcactgcactgtcagcttgcgccatcaatgacgtttcggcaagacaagacggtgcagtcgacttccctgtaccacatcatagtcccgagtttgcaagcttggtccatatttcagagtctctggagattcccatgcaatccgcgactcctgctttttcacactggctgcataggcagaccaaaccatggaaggaagcctataaactaaaggaaaaggtcattagagaagagattagcaagcgtcttcgtgccgcggaagctaatgatggtgaattcactgtgcgtaatggccttgactctatcttgagaagagaaaagatcctgtcagagagagagggcaaagttccagactacttctcgagagcaatggttgacgagagccatggattcgtcagtggcggcgccgacaccagccatacggctctggcgtggagcgtcaaaattttggcaagatatccaagaattcagtcgaaattgagagctgccatctttgcaggcttccctgcggcggcagcagaaagaagatttcctagtgccgcagaaatagccagtgccaacattccatacttggacgctgctgaggaggagttgatcagacattcaaagacagagatcagctcactaagacgtacgaagagagatatcacgcttcttggtcatagagttcccaagggcgttgacatttggtttcttggtattggtccaagctattttgagcccgcacacaatatacccgactcgatgcgtagccccacagctagagcagcgaagagcaaggtaggcgcatgggacccaagagacattggcgagttcaaaccagagagatggctggtcagggataccgatggcaaggagacgtacgacccatcggcgggcccacatttgacgtttggcctgggcgtcaggggttgctggggtagaaggatggcctacttggttgtgaagattggtcttgtgctgatgctttggaactttgagtttctgcccatcccagagcatttggatggtgaattggctagagatggtgcatcgcactcgccacagcagtgctatgtaagagtgaagaaggtagacttatga

SEQ ID NO: 316 - DNA, 7293 bp, Acremonium sp.
atgaacggatatcaaattcccaagcctaatgaggcattgaatggcgatactgtcatgagtcaaagagacttccccatcgctatatgtggcatggcgcttcgtctgcctggcggtctggagactccacagcagctgtgggattttttaatagccaagaaagacgcccgttcgagagtacctgagtcgcgttataacatatcatcctattactctggcgtcaagcagagaggtgccgttgcagcggaatacggctatttcctggatgatggcatcaagcttggtgcgtttgacgcgtctagattctccttcaaccgtggtgagttggaggcagccgacccccagcatagactgatgttggaggtggtcagagaatgccttgatgatgcgggtgaagtcaacttcaaaggtaagccaattggctgttacatgggctgctacggtgaggactggctagagatgcaaaacaaagaccctctgcaaactggtagcaatagagtcgacggctatggtgacttcatgctgtctaacagagtctcttacgagatggacttgagaggtcctagcatgaccatcagaacggcctgttcatcagctctagttggcttgcacgaggcggccgtggccattcaaagaggtgaatgcgactcggccattattggcggatccaacttgatcctaacgccacgtgcgacggccttcatgaacgagagaggtgttttgtcccccgatggatcgtgcaaaactttctcggcagatgcgaatggttatgtcagagcagaaggcgtccttgcagtgtatatcaagccatttgaggctgctgttagagacggcaacccaatcagagctgtcatcagatccaccatgaccaatagcgacggtaagactccaggtataactcatccaggtaccgacacccaggaggctcttatcagaaaggcatatagagcagctggtatcgaggacttctccaaaaccgcatttgtcgaatgccacggaacgggcacttcggttggcgaccccgtggaggtcggtgctgtcgctagagtctttggagacactggagtccatattggctcggtgaaacccaatctgggccactccgaaggtgcctctggtcttacatctttgataaaagctgtgcttgcacttgaacacagaactatcccaccaaacatcaaattttcgagcccaaatccaaagataccctttcaagagaggaagttgactgttcccactgagccaacattgtggccagagtctagacacgagagagtcagtgtcaattctttcggtgttggcggtactaacgcacacctgatattggactcggctgccagtttcaacgtatcctcgtctggttcgggcacccgtgtcggagacgatccacagctgttactattctctgccagtacatctgcatctttgcaaagcatgtcgcaggttatgcaaagttgggctgctgataacgcggactgccttgaggatatggcgtatacccttgcaaacaggagggaacatctggcgcacagaagcttcatggtaactcgtaaatataggccaggcaccgcgtctgcaggtaggagaatagcgaatccaccatccaatttggccatggtcttcaccggtcaaggcgcccagtggccacgtatgggaagacagctgctgttgagatcggatatgtgctttagaaaaaccattgagtcccttgacaggtatcttcaggagatacccggtggtcctgagtggacattggtggaggagctgctgaagccagcaaagctgtcgggtatggagagggcggaattgtcccagcctctgtgcaccgccgtgcagattggcctggtcgatttgttcgcggctgtcggtgtgaagccttcagcggttgttggacatagtagtggtgagatcgcagcagcgtacgcaaccggagctttgactgccagagaagctattgtgacgtcttggcgtcgtggcgtagccgccaaggctcagtccaagcccggtgcgatggctgctgttggtttgggttgggatgatgtttctggaacggatggtgctcgtgtcatcgtggcttgcgagaactctcccaagagtgtcaccctttctggtgatgctaatcaggtcgaaagcacactggcgcagatcaagcaggcgcatcctgatattgtggcaagactattgaaggttaacaaggcgtatcactcgcaccatatgcgtgaaattggcgccgagtaccatgctacgatcagagatgagatagtcggcaagctgcctagaaaacctttcttctccagcgtgaccggaaaaaaagaagagggtttgcttcttgatgccaggtactggcaaacaaaccttgagtctcctgttctgttcagatcagccgtctcggagatgctggagcaggaagaagacttggtctttttggagatcggacctcacccagcccttgccggaccagtgagacagatcttgggagaggcggcgatctcagcaccctatgtaggtgccatgaaaagaaacgaagattctgtggtttcattcctagaggctttgggaaacttgttcgagctaggcattttcgtaaacttcgcggcccttttgcccattggcagatgtctgccagatctgcccagatacccctgggaccatcagagcaactactggcaggaaaccaggatctcacagcagtggagagcaagtcaattctccaagcatcctcttttgggcacaagaacgttggaaagcaccgatattgagcctgtctggagaaacttgttgcatgttgacgaggtcgattgggtcaaggaccacaagattgacgagagcattgttttgccagccgcaggttacatagccatggtcggcgaagcggtgagacagattagcggagtacaagagggtttcgctctgcgtcgtgtggtgttgaatgccgctctggttttgccagaccaaaggcctaccgaattagtcactacgttccatccacatagactaactgagactttggatagtcagtggtgggacttcacgatcgcgtcatacaatggccaagcgtggaccaagcattgttttggtcaggcctcaggcgacatcccaaagtcgattgagacttttgctctgccatgtccattgccaagaatctttgaccaaagaagatactacgaatacttggacaaagccggcatccagttcggtccacactttagacttttgacagatctaagaaccggctcgattgagcgtgtaggtacggcgggaatcagggacgagctgagaggagatgacgagagatattgtgtccatccaacgatcatcgatggatgcatccaactagcagctcctgctgctctgaaagcagacactgacttgaagagatacagggttgtaccaaccaagatcgaccatgtcactgtacatagatgcccttccaaagccaaattgagcgcgtcctgttcagcgtcgtacatggaaggcagtggccaggcaaaaagcaaagtgcaacaggtcgttgctgatggccatgttgtcatgcatatggaaggtttagagctttctcccctgggccaggccgacaagaccgaaatcgacagtattccagcggcgttgctgaaatggaggccacagatcgacttcttggatccatctgagttgattaagcccgagatccctagacacatatacactccacttttgaaccagctggtacagctgtgccttgtgtactcccatcgtcacattaaagatactcaaacagcgacatctcatctgaaaaaataccaagcctggatggagcaccaagtacacgtcatcgaggcagtcgaaaataccaaaatggtacctttggacgacaccaccatcatgaataaggtggcgcttttggtccacgaaatggcagacagtccagttgctgcatgcgcaatcgccatacaaaaggtcgtcttgaatatagtcgcactgttttctgccgaattggaaccacttgaactacttttggctgatgacacgctttaccaactatatagatccacagactccattgacaggtcgcaattcgtcagacatttggcccacagtaagccaaatttgcgtgtcctagaagtaggcgccggcacaggcggtacgacagccagcatgttggaatatttggcggattccgaatctagcgaattgcccatgtattccaagtatacttatacggatatttcggctggtttttttgcctccgccaaggaaagattcaaaaattatagacaaatcgagtatagaacacttgacataagtaaggatcccgctgagcaaggcttcacggagagcgacaagtacgatttgattctggcaacaaatgtaattcacgcgacgaagagcttacaggaaagcttgagaaatgtctatcagttgttggctgacgatggcagactgctgcttcacgagttgaactcggaatcgaaatggcccaactacatctttggtttgttgccaggctggtggtacggcgagcaggatggtagatcgaatgagccatatgtggatccagccagatggggtgaggaattgaagcaagctggattccctggactggacgccgtcatactggacgcggccgagccatatcagctgaacgccatcatggtcgcgaggagacagagccacgcagctcagacgcctttgaaagccgccaccattatttgcgacgacaatgttgatctagccatctctttgtcgcagcagctgcaagatagaggatatacagtgcatagaagaagagtcggcgaagcccttccagactccacagatagcattgcgttgctggactttgaaagaccttggttcgacagcatggacgaaagctccatcaaagcgttgcaaagccttttcgacagtttgggaaattctggaatcttatgggtgactagaccttgccaagttcagggtcgtgatccaagatatgctcaggtcatcggtgccgccagatcaataagagccgaaacgctggtggatttcgcaacgtgtgaagtcgacgacaccaaaacgtctcaagacagaataactgatgttttctccaagtttcagtcaagaaaagaagacgaaacccttagaccagattacgagtacgcaattgtcaatggaaccatacatgtgggcaggatctatcccatttcgatgaacaacggcccatcgttacttgctagccctgatgacagtatcgttctaaatgtcgcaaagcctggtagattggcatccgccagatgggttgctcaacacgtgccacctttaaaaggacacgatgtggaaatccagtttcacgctgtaggcctgaacttcaaggatgtcttgggtgctttgggcattgtcccatatcccgaggcaggcttaggcgcggaagcggctggtgtcatcactcgtgttggagcagaagtgcagagattgcgtcctggcgacagagttgtatgcctatgcatgggtacaatgtcgacccgtatggtcgtttccgaggatacgtgcgcaaagatgccagaaagcttgactttcacagaagctgccacaattccagtggtttttgcaacagcggtgggctctctggtcgatatcggcggactaagagaaggacagtccgttcttatccacagcgcctgcggcggtgttggccttgctgctttgcaagttgcaaagatggtgggtgctgaaatatacgcgactgtcggcagcgaggataagattgaatacttgaccaaggtatttggtctagccaggaacagaattttcaactcaagagattcaagttttgagcaagatcttctgagagaaaccaacggcaaaggcgttgatctggccctgaactcattgtctggcgagcttttacactcgacatggcgttgcgtggcccaattcggacagatggtcgagattggtatgagagacttgctgggagctggtaagttggacatggacgtcttcctgggtggccagagtaagtgcatgcgtttgaaatggctgttgagtttgtctgcttacgtcttgtccttcagattactagaaaggatcatgacgtatctggagagtggcttgatcggtccaattagacccatgcagacatttgacgctggtgaagttgaagatgccttcagattcatgcaatcaggtcaacacttgggcaagattgtcatatcactaagagatgagaagggttccatgaagttggatacagcctccgtcaaatcactaaagacgctgaaccttgactcttcggcatcttacctgatggttggtggtttgggtggcttgggaaaatctgtggcgagaaacttggtagagaagggtgcgcgtagactagtcttcttatccaggaatgcaggtaccagtcctgatgatcatgactttatcggagagttggaaagcatgggctgcagcgtcaacctagtcaaaggtagcgtgaccagcaaggatgacgtgataagagcgatctcagaagcttcgaatctgaaaggcatcatgcaatgctccatggtacttagggaccaggctttcgccaagatgactttgaccgaatggcaagaagccactgcacccaaagtcgagggaacgtggcatctacacaacatcacgacggaagccaacattcaattggattttttcgtgttgttctcttccatgtcgggagccgtaggccaagccggtcaggccaactacgctggagcaaataccttcttggactcgttcgtccaatacaggaggaacttgggcttggctgcttctgcgttggacattggacccgttcaagatgtcggttacttgtcgaaaaatgacgcgttgctgaagagaatgacacagcaggctgcgcattccataaccgaggccgagcttctgaaatcagtcgaggtagcgatgtcattgtctgcggcgcctgaggagcttattgagacacccgctaaggatggctttgtggacagcagtacaatcttgcttggcttgggtacatcgtttgccgccgacaactctgccagcaaaacctttttcaagaaagacaggagactagcagtttatcagaatgccagcgcggatgctgaagtaggcaatagtgtcaactcgggcagcaataatctgaagagtttcttgatgagcgcaaagagcgatactagcatgctgaaaaggaacgacgccatctccttccttgcaaatgagatcggcaggatgctttttacattcctgttgaaatcggacgaggagctgaacacgtctgtcgcactttcgtcattgggcatggactcgctggttgctgtcgagatgagaaattga

SEQ ID NO: 317 - DNA, 2367 bp, Acremonium sp.
atgagactttgcggtttggtcccaaagttgtttgtgttgcttttccctggcttctcggtcgcaacgaaacccaaccaagccagctgcaatgacgccctgctagaggcctatagcgaagtgtccttcgctggtccaggctttggagactactgtgtttcgttttgcaataacagcttgaagcttacgtctgtcttcgcagcagagaagatatattgccaagtctccaacttggatggtgtaatcgaaaccgccaaggctttctgcgaaatcgtgttgatagacgccgaaacgctgatcgagcaagctgctgctaatgtgaccgagtccttcattaacaagctaccagttgttggtcagggtcaatactcgccagccgagaacatctcgcatccctttttgattgccaagccatggttcgaagtggcataccgtacaaccgtaaaccttaccgtgttgaaactgacggaagatagatgggccatatttggattctggagcattgtactactgacaggaatgttgaccagggccattacactatatgaggaaagaaaaatatgcagaaaggtatttggcactgaggaagttattccctccagagcagcctcacatccacccgtatacgctttctggcaattttggaagacacattgtaaaattaccagtgcgttcaggggttatcatcagagaatattgatgggatgcacgataccagcgcgtgcgcagacaatcgagctgtttagtttctggtctttgaaccttattttgtgttgtgttgactatagaggttttgccggcaatttataccatcccgaagtctcgcagcagacatggagatatatggcagatagaacaggcatcctttcgtttgcaaatcttcccttactgtggctgttcacaggcagaaacaacgtattcatctgggcaactggatggtccttctctacgttcaatttgtttcatagacatattgcaagaatagccacgctacaggccatcgtgcactcaattgcttacaccttattctacttagagtatgacagcggatgtggttttgtaccaaacacgagtggctcatggacccttttgctaatggcaacaatctccatgagtttgcttgtcggcttcagtttcttgtggtttagaaggcatgcgtatgagttgttcctgagaattcacattgctctatccataattaccattgttggcttattttatcacgtggacatatttgacggagcgtacaacggttacctatggccacctgttgccatttggtcattcgaaagaacggtcaggttggctagggttgtgctttgcaatgtatatgtttggatcaatcatggccaatctcttcatcatgcaatgtccgtagctcactacgatgaagtgggcgaggtcttgcgtttgagacttcccatggaccagaagctgtttaaaccaggcccaggtcagcatttcttcctttaccagccattcagatggagaggttcagagaaccatccattcgccttggcgtactgggatcaagcctgcgagccccaggcagatcctgtgccctccacttctgacaaaatgagcccagttacgaaacagaacaggatgtcttctagacacggcattccattgttagtgagcaatgctggaaaggaaaatcttggcataagctatgagttcagagttcgaccacgtgatggctggactagatcccttagagatagatgtctgcgtgctgaaaatagacaaatagcctctacaatattgatggagggcccatacggccaccatcaggctctttggaagtacgatgttgtgcttttgattgccggaggttccagaattgctgccatggtaccttatattttggaccatgttagccgtggtcaaagaaaagcaatacaggctggcaaggtgaaattgatatgggcaaatagaaatgaggcttacatgagaagcttggcgagacaagagctttctagcggtttcagttgcgaaaatgtctccggatccttccacgccaccagatcacctgttgctgtgccaaacactttcgttgcggacaccagaaccatggaggagaatcagaccagcaataacaagcaaagtggaacccaatcgacagacgagatttcctcaaatgagagtttggctgccacgcaaagtattgtcgctgtcagcttgggcagacccgatataaagggtttgatcgacgcggcagccactgaagccacgatttctcactgtagccttgctgtaatggcttgcggtccagcgtcaatgacgaatactgcaagagcggctaccaataatgctatgatgagatgccatggtcaaattgaatactttgaggaagaattcggttggtag

SEQ ID NO: 318 - DNA, 1338 bp, Acremonium sp.
atggcaactgcatataatatcactttgaattcagacaacaccggtttgtggaaaattaagcagactaggagtgctgccgaagtagcatctgagttacttcaagatgatctggagaaacatcatgtcattttcaatgacagaggattccataaccatgtgccacatcaaattcttgcgttgtttggaaccggagcaccaccagatgtacttaagaagagatattatgaacactcaatctaccagttgccattgcagccagcctccggtctagttgttgagaggttgttgaccacatccgattgggccgacgctgctccttttctaggcgaacccgaccattatccatcctttttgcaattctttcaaaatcaggtcagtgaagatggttggcaagacgtggtgcagaagtacctttttgctggaggaagattggcggacgatatgttggcccgtttgcacggcgcgattctgcacccattgattcagttgatgtatggagttgaatggtcgcaaccagcgatcgtggccgaagcacttgcacagacagctgtgcataaagaggagaaattaaagcaattcttgttcgattctgagaaagaatcaaaagctacaacagagaaaatgccatcaatactggacctgtaccgtatggttgctgaaaacaaaaaattggccgaatgcgtgaaaatcgacgatgatcacacaaattataactcgataatgaaatgcgcgcgtgctgaagccctagctatcgcagctagggtgcacgttaagccagaggatttggacgaaagaacagcagagatgtttcaggatgtattgtgtgtcagtgccgctggtgccatctatccaaagaaatatcccaagtttgacttctacttcattcataacgtcaactcgtgccctttctatcctatggtgaattcgctgacatgggtttctccagagatcaaagtcagacttctggaatggaaaataagactagatttgttgatgtacgcagccggtggctgtccatccttggatttcacttgcatcaagtcctatgaaactatcggttctcatcccgcgggctccccagaaagaattttgtcagtgcttcatcttattccagacgatggtcatgctatgaaattgggtagagcctcttggatatgcgaggatatatgcaaactatatgaagagaaagactgggcaataatcagcggccatgatgcatggctgaagatctatcatttaatcgtcgactccgttgaggcaccaggtttgtgggtgagaggatgcggctttgaagatgcatggaagggtgtccctgacctgcctggccctaatgcctaa

SEQ ID NO: 319 - DNA, 771 bp, Aspergillus niger
atgacaatcctctgtctacatggcggcttcggcagcgcccaaaacttccaagtgcaactccatcccctagttagtacctaccaatcattataccccgataccaccttccactacattaatggcggtcatcccgccacgcctccaccaggaagcgaggattacttcggcccaccgcctcattaccgattcatcgaatacgatgggattgggcggtccgacgatgtgatggagcggattcgtcagctcccgaggggagccacggccgaagataccatgcgggtgttgacccacgaacatgagatgatgtctgccgattgtgtgagagaggcgttgcagagactgttggggatattggatgaacatccggaaattgacggagtcttgggcttctcggagggcgctacagtcgctgctactttgttgcttgaagaggagcgacttgttcaggaggagggtaggaagagacagcttaagtacggggtcttcatagcaggctggcctccccttcgtattgacggcgatcgagtaacaggctgtctggcggatgagacagaggatatgatcgaagtgccgacgtgtcatatcatcggggcgaatgacccctacgtggatggcaccatggcgctgtatggggtttgtgatcccgatacggccatcatgtttgatcatggcaagggccataccattccgcgggacgtggcgacgatgaaggaggcggcagaggtgattgagcagaccaggagacgggggattgctgccggggatgcgtag

SEQ ID NO: 320 - DNA, 6795 bp, Aspergillus niger
atgcataaccgagcttccgcattaacctcagatacagccgccataatgactatcacgaacagttcgcaggcgccgattgcaattgtaggcatgtcctgtcgccttccaggccaggttcgtacgcttgatgacttctggactctcatatctcgcggtagggatgcttggggccctatcccttctgatcgcatgtccagtgcggcctactaccacccagatccccagcgaaagggctgtttcaaccccaaagggggttattaccttcaggaggatttctctcagtttgacgctccgttcttccacataacgcaacaagaagccattgccatggatccccaacagcgactactactcgaatgtgcctatgaagccctggaaaacgccggttttccccaacaagccacggcaggctcgcgcatgggggtcttcacgagcctttgttcatcagactaccgtcgtggtgcttttcgcgacctggactccgttcccatttttgacgccacggggaatcaggaatctatccaagcgggtcgcctttcccatttcttcaacctccgtggcccatgtatggcgatcgatacggcctgttcgtccagtctctatgccctgcatctggcggtgcagagtattcgttctggcgatgcggattcagccctggttggtggagctagactgcgtttgcagccagatgagatggtttcaatgtcgatgatgggtttatacaacgagcaaggaaaaacctttgcatttgatgatcgtgccgtttcgggctttgcctgcggtgagggagtgggctgtcttgtcctcaagccattagaccaggccctggaagacaacgatccgatctattcagttattaggaacacaggggcaaatcatgatggtcgaactgtcggcatgacgaaccccaacggagacgctcaagaagaactcatgcgagaagtctacgcccgcgccgacctctccccgattgataccggattcgttgaggcgcacggcaccggaaccaaggttggcgatcccatcgaagtcggcgccatccatcgggtgtttggggatggccggaccaagcgggcaccgctatacctaggctccgtcaaatccaacttcggacatctcgagtgcgccagcggtattgcgtccgtgatcaaagcgtctctgatgctccaccgtggcttcgttcttcccaatgccaactttgagcgcgccaatcccgccatccctcttgaccaatggaatatcaaggtgccgaccaatctgcgcccctggccccagggcaagaagtacatcagtatcaacaacttcagcttcggtggctccaactgccacgtcgtactggaacggcctccccgttcgcgcggccagcctcccaacccccaacacgatgcgccccagctctttgtactcagcggctatgatgacgaggctgcgaaacgcattgccaggaacctcacgttctacttggaacaacatcccggtgtcttcgaacggcgcctggtgcacgatatcgcatatacacttggcgagcgacgctctcactttccctggcgcgttgctgtcaccgcttcatctaccgcggaacttgtcgagaccctgaatgggccagcgagtgtccctcagcgcgcccggctggaggctggctctgcacctgttattgcctttgcgtacactggacagggcgcacaatggccccgcatgggattggaacttagcgacacccaccctatttttgctgccaccatggaggaagcagcacgcgcactggaggatctgcgagcggatttctccctgttcgaagagctgaagcgtgaggcagctgactctcgcgtcagtcagccccagatctctcaagtagtttgcactgccgtgcagcttgccctgacggatcttttggcttcctggggcgtacaaccgcaaatggttgtcggccactccagcggagagattggggcggcctatgcggtgggtgctatttccgtgagcgaggccattgccctggcatatcatcggggtcgactcgctgcccaggttcgaatccgattcccaacgttgaatggttgcatgatggccgtcggagagagtgccgatgaggtgcgcaaaaccatcaagcaacttcagctaggagaggacatcactgtcgcttgtgagaattcacctcggtccaccacggcgtctggagatgccactgccatggaccttctcgcaaaggagctggaagcgcgacagatctttcatcggaagcttatggtcgacgttgcctatcactctccccacatgcagctgatcgccgatgagtataccagcgccatccagcaggtcgcaccatccactaagagggagaatgtccagtactactcctcgctgttaggtgaaaagatcgagcaacccggggctctgggagcatcgtattgggttgataacctgacgcacccggtccgattctctaccgcgctgggccagctgtgcgctgagtccagacccgatatcatcattgagatcggtccgcattccgcgttgcagggcccgatcaagcagatactgcagggcatccagaatacgcacactcaatactttgcctcccttgtccgcaaggagcacgccactaaggctgctctacagctcgcgggccggttgttcatggccggccagcagctggctttccgtgaggttaaccaaactcacctggatcagtcagtcccaacagtgttgccgtccctgacgccgtatccctggtctcatcgctcctactggcatgagagccgcatcgccgtcaaccaccgactgccacgcttccctcgtcacgacctgcttggacgattggaagcctctacccgcgaggatgaacagcccgtctggcgcaattccgtgtctctggacagcgtgccatggctccgcggtcatcgtatgcaatccatgaccaccttcccaatggccggctacatcagcatggccgtcgaggcggcatctcaacgggctcagctcagaggcctctccccgtcccagattgccgggtaccggctccgtgagttccatgcttcctcggcgttcaccctggaggagaacgtcgagtacgaaacctggctctctctgagctcgttcacggagggcacccgctcctactccagcgaatgggacgaatttcgtattgcctcgtgggcggccggtcggggttggcgtgagcattgccgtggtctcgtgggcatccggcgccaggagtcgtccactactaaccctgttagtcaacgccggccgtttcatgctagcctggagcggcgtgaggacgctaaacagggtgaccaccgtcctgtatcactaaagactttctactcagacctagagggccgcggagccggatacagcgacgcgttcacgctcgattcagacagcggggtgaccgttggaagagcaggcgtcgggaacagctggtatgcgcgcggaaaggttacagttcccaacaccgcgcaaagcatgccctcaggccatgagaccccgtttattgtgtctcctgcgttcctggatctatttttccagttgtccttccccgttttgcgggcggactctgccaacattccgtgcctcttcatgccgacttctatccgggagatcaatatcgcagccaatttcccatcgcaaccgggagaaacggcggaggccctagtcaatggactgccggcagattcctcccgtcctcggccattggactatacccttgatgcatggtctccgtctgcgtccacagagcaacccgtcctcactatccaagggttccgaatgacccctgtcaatggcgatatgctgattgacaccaccccgtatccgtggtgctacactgtacagtgggagccactgccttctgcaggtgaagcaaatggcacggcccaaagtgtcccagagagtaatggacatggcgagacgaatggcaatggcattgtgcatgcgaacggcaatgatgttgttcatggcaatggcaatcacaatgcatctaatggaagctgccatgtgtcatcagaagacgagtcaaccgtcatcatcatcactgagaggcccagctctgatccacttatcgccactctcctgacagctattgatgccttcacggggtacagaaccacggtcgcccccctctctcgcgtccagatctcgtccaaggatcgatacatctgcctggctgagctcgatactccacttctgcagtcactgaccccggaatccttcaaacatgtccaagagctcctcgtcacgtgctcctactgcctctgggttacctccggcgcatacatggctgtcgatcatcccgagctaaacattgttcaaggtctgctgcgttctgtgcgttcagaaaccggaaactcagctgtcagccttgacctggatcctagttctcgccaagacatcgcaggtcgggctcatctaatccttgatgccttcaaagcgtccaccaacgctgtccagacagccgccgatgacgaggaggaagcgcctctatccgattatgagttcaccgaagtcggtggacgcctgatggtccctcgcctagtagagcattcagaattgaacaataccgtgtttcaagagacacacccatctcttccgtacattcaggacttcgaacaaggaacggatcgccgactcaagattgccgtcggcaccctgggcgccctggactcactctactggaccgatgatccggcccagccgctcggcgccgacgagatcgagatcaaggtggcctgcacaggcgccaacttcaaggatgtggtaattgccatgggccaggtcgccagtccttacttgggcatcgagtgcagtggcacggtggcgcgcgtcggagccaaggtcagttccctcaagcccggagaccgcgtatgcgccatgtcccacggcgcgtatagcacctacgcgcggtgtccggcaaccagcgcggctgtgatcccagactcaatggactttgagacggcagcttccatccccgttacctacagcacggcttactatggacttgtcgagttggctcacatggaagatggggaaagtgtcctcatccacgccgcggcgggaggcgtcggtcaagccgccattcagctggctcagctaatgggagccgagatctacgccacggttggtagtgaggagaagaagcagatgctgatcgatcgatactgtatcccggcgagtcgcattttctatagtcgcaacaccgagtttggcccttgtgtccgcgaagccacgggcggacgcggcgtggacgtggttctgaactcactggcgggcgatttcctgcgcgagacgtgggattgtctggctccgtttggacggttcattgagattggaaaacgggatattacttccaatactcggctggagatgggcaagttcgagtacaactgcacgttttcctccttggacttgacgcttgttgcggaccagaagggcaaggtcctcaaccgtgtatttaccgctgtcatgaggatgttcgcacagggaagactgaccccggtatatccagtgacgacggtaggtatcgcggaggtggaatcggtgctgcgcaagttgcagagtggcaagacgacgggcaaggtcgtagtggatcatcggattaatgggaagatcaaggccacacatcccctaccgtcgagtgatctactttcaccggatgctacgtacattgttgtcggtggcaccggcggtattggccaatcgatcactcgcagaatggttcagcgcggtgctaggcatattgtcctgctctctcgcagtggcgccgtcacggaagccgcccagaaaatcatcagcgacggccaagccgtggatgcatcgatccagatcaaaaaatgcgatgtgtccgaagtttctcaggtcaagtcactgattgcagaactacagaaagagctaccaccagtccggggtgttattcacgcggccatggtcctcaaggacgttttcctggagcaaatgacattcccagactgggaagccgtcctccgtcccaaggtcgcggcagcctggaacctccactacgcgcttctccaccaaccactggacttcttcgtcatgctttcctccgtgtctggcatcgtcggcagtcgcggccaagccgcctacgcagcgggaaactgcttcctggatgcattggcacgctaccgccgccaaaagggcctatccgccgtatccattgacttgacggcagtaggcgacatcggggtattctcggaagcagcagacaagaaaaaggcagaagtgctgaggaacctggcgatgagcaacacaatgcgagaagttgaagtactagctctgatcgagctcgcgatgaagggccagcaagtcccagaacagtgcatcaccggtgtgcattggccttcctccgccgcaactccgtactatgcttctgatgcccgcttcacccatcttgtcgagaccgcgaagcaggaggaaggcgctgatgccacggcccatgccggagcaactaaatctctctctatcacccagcaagtccgccgcgccgcgaacctgcaggaagccctcgatgttacggcggtcggtctacgtgataagttgggtgacattctcatgcttccccgagaagtggtggaagcgcatacgcagtcgactcccattgcgtcgtttgggctggattcattgaatgcaattgagctgaggaattggattggcaaggagctgaaggggcatttgcaggttttggagttgttgtcggcgggaactttggggtcgttggcgttggtggtgttgaagaagtcgagtttggagggggcgtggaagggagaaatcccaaactaa

SEQ ID NO: 321 - DNA, 2043 bp, Aspergillus niger
atgcggtctctgcaggttttcgccctggcaggcgtccttggcgcgtctgcccttgatgccgactctatcctgagcaaatactttggcaacgatgctccttggtatagcgatcgcattcccctcttcgagacagatctctccgacattcaagatgtctactattaccgctggagcattttccgggctcaccagcgtgaccttggctcctacggctatatctccaccgagttcctcaacgacgtcagctggcaggaagaaccttatgccctgctgattgatgcctccaacttccatctgcgcgaaggccgctggtgccgcgaccgtcgcttcaccagcgactactcgtcttttctcttcggcccccatggcgccccctaccaattctccgaatccatggccgacggcgtctggcaggcctacctggtcaacggcgtcgctgacgatgccactcccctgctgtcctccatgcagaccgtctacgccggctggaactccacctctctcggtgtcggtggctacgacacctccaagggcctctactggatccagcctctgactgatgcgaccgaatacaccattgccagcatcgacgcctccgggggggaagacggcttcaccggcggatatgccttccgtcccagcatcaacagctaccaatatgctaatgccctggctattgcccacatcgccaacctcaccggcgacactaccgtccgcgagcaatacacccagctcgcaagcgccctcaagacccgtctccaggacgacctctggaacagcaccttcgagcacttcatcgaccggtacaaggaagacaacgactacgtgacctactgggacttcatccgcggccgcgaacttgtcggctacgtcccttggacacatgacctcccggacgacaacaccacctacgccaacgcatggactcacatcctcaactcctcacagctagcaggcgagcacggccttcgcaccaacgaacccagctaccaatactacatggtccagtaccgctatgacggctccaacccggagtgccagtggaacggccccgcctggccctatcaaaccacgcaagtcctcaccggcctcgccaacctcctggaccactaccccaaaaccgccgcaacaggcgtcatcaccaccacagactacaccaacatcctcctccagtacgccaagctacactacaaccccgcccgcggcggtgtccttgacatcgaagaggactactactctgacacgggcagccctatcgtcggcctgccccgctccccgcactacttccactcgggcttcgtcgacctcattctctcgggctacgtgggcatccgacctcgcgcggacaatgtcctggaagttaacccccaagcggacgcttcggcagtgagctacttccgctccgagcgcatcatctaccacggccacgaggtcgccgtgcaatgggacgccacaggcagtcgatacggcaccgtgggccttctcgtcgaagtcgacggcgaaaccgtggccaccagcaagaccctcacccgtctcacggttgagttaagctccgcttccgccccggcagtctcccgtcccatcgccgtctcggtgcaactcgccgctgatagcgagtatccgcggggtagtgtatctgtggcagacgccgacacggacgccgtgcactcagccatcgacggccgggtctggttctattggatcgaggacgtagccaatgggtgggatagtcccgttgggaatgggacggaggtgtggtaccaggtggaatttgagaatgcgaccagcacagcaagtgcggagattgcgttctttgcgaatagtacgcaggggtatgatgtgccggggagctatcgggtggaaacgagcgattcgacgaccggggagtggaaggaggtgagcaatgggaattatagctcggcggtggcgaatggaataacgacggtgagctgggatgaggtgacgacggaggcgttgaggttggtgttcacgcctaagacgggggagatggtgcggttggtggagtggaaggtgtttgggtag

SEQ ID NO: 322 - DNA, 3111 bp, Aspergillus niger
atggctaccacccccggacaacgtctcttccctgtggtcgtcgaccacctcgcccagaccaacccagctcagcgcatcggtctcatccccaagggtgctgatgtctctgatggctatgatactgtgaccgtccagcgtctggcccgcgcggtgaatgtctttgcttggtggattgagaagcagatcggacgcgcccagaagccagagaccattgcttacatggctagcaatgatgtgcgatacttgattttcctcttggccgctcataagacgggatacaagcccctcctcccctctactcgtctttccgacgacgcctaccagcacatcctcaacgccaccgactgccacgccttcttctacacccccgaaaagcagcgccgcgtgtctgaaattcaggccttccgtccggatactgccttccatgaggtgccctctatcgcagagcttttcagcaccactgctcagccctacccctacaccaagacctaccaggaagcggaggacgatgtcgccatcatcatccacagctccggcacaacaggcatgcctaaacccgtccccctgacgcacggcttcctcgccaccctcgactacggcgcatacatttcgcgtccccaatcccgccaatccaccatgttcaacgacctccagcccgacaccctcgtcctctccaccacccccttcttccaccttatgggtctgctcgccttcgccgaatccctcttccaccacatcccctttgtcgttctccccgacaagcctctctccgccgacctcctcacctccgtcatcaccgccaccaagcccgcggccgccatgctgcccccttcccttctcgaagacatgtcccacgtcccagctgcccgcgccgcactcagcaccctcgaaaatgtctacttcgctggcgcccctctctccccggaagtcggcgatgatctgtcccagctgaccaagatcatcactgtcatcggatccagcgaaatgggcctgatctcctcgttcgtgccccaaggcacaaatgtgtggggctacttcgactggaaccccgcctacggagtagacatgcgacatgtcagcgacgatatgtatgagcttatcatcccccgccgcgcaaacagtcgccgaattcatggcatcttccacaccttcccagaccgctccgagtaccgctccaacgacctcttcacccgacaccccgagcaccctcacctgtggaaataccacggccgacttgacgacgtgatcgttctcagcaacggcgagaaactgaaccccgtcaccctggagaagatcgtcgaggggcacccgcgcgtgcagcgggctctgctcatcggccaagcccgcttcgacacggccctcatcatcgaacccaacagggctctcgagggcgagaacatcgacgaaaaagcctttatcgagagcatttggcccaccgtggagcgcgcgaacgaagccgtccccaaatacggccgcatcgcaaagaccaggatccgtctctctgaccccaagaagcccttccaactgacccccaagggcaccacgaagcgccacgccgtgaacaaggactacaaagacgagatcgacgccatctacgcagcagccgaggaagaatcagccgccgtcgagctccctaccaccctcaccaccgacaacctccgcactttcgtccgctccctcatcgccaacctcctcgaccgcactgacctccgcgacgacgaggacctctacgccgccggcctggactcgctgcaaaccatccagctcgccaaaacccttaacaaggccgtcgtcgccgccggctaccccgccggtcacgacatctcccagcagcaaatctatgccaacccctccgtatcccagctcgctgcgtacctacacgacctagtgaccggcaacctgcgcacaacgaccatctcccgcgccgaccgcatcgccgccaccatcgacaaatacaccaccaagctcccgcgccgcaccacgcccgccgtccctgccccggccaactccaccgtgatcctcaccggctcgaccgggtcgctgggaacctacctcctacacagcctgctcaccgacccaaagatcgcaaaagtctactgcttcaaccggtccgatgcggccgagcgccaacagcgcagcttcgccgacaagggtctggatactgcgctgctcaaccccagccgggtggaattcctcactgtgtcatttggcgcgccccgcttcggcctgagtgagaccaagtacgccgatctcctggagaccgtggacttcattatccacaacgcatggaaagtcaacttcaatcacccgctggagtcgttcgaggacccgcatatcaagggcgtggtggagtttatttccttcagtgtgaggagcaagtacaacgcacacttgtcgttcgtgtccagtgtgagtaccatcggtggatggacggagaagttgggccccgtggtgccggagacgccggtggagagtgtcgatgcggtgctggtgcaggggtacggcgagtcgaagttcgtcggggagaggttgtgtctggctgcgtcggaggggatgggtgtgcccacgacggtgtttagggttgggcagatttccgggccgacgactgagaagggcatgtggaatttggatgagtgggtgcctacgttggtgaagaccagtaaggcggttggaaaggtgccggcggatttgggtgggtatgaggttgattgggtgcctgttgataccctctccaccatcaccaccgaactcatgcacacccgtcgccaaacccaatccgctactccacacgccgtctaccaccttgtcaacccctgcaagactccctgggcgaccctcgtccccgccgttcaggccaaataccccggtatgcagacggtgccgctagaccagtggctggacgagctggaggcgatcaagtcaccgtcggagaccgaggtgcgcgagaagcccgcgctgaaactgcttgatttctaccgcggactcgcgggcgaggtgctctcggccagtattagtgtggagcagacgcgcgggggcagcaagaccatggagggattgggggctgtgacaggccagttgatggggaattggttggggcagtgggatttctga

SEQ ID NO: 323 - DNA, 327 bp, Aspergillus niger
atgcatctttctacattgctcctccccctcctccccaccgccgccctctccgcaatctgctaccccgagaccggcggctcgaactgcgcctcgctcctcagcatcaaagaattctactcccttcaatactgcacctaccggtggaacgtgctttacggcgactgggaccacttcgtcaacaacgcgaccagcccgacgaaggtgcacgccagcgtgggtaagacgggcgtgtttgatagcttcgaggactgtcttaatgggtttgaggatgtcgtggagacctgtcatggtgttagtcagggtggggttatgaccaatgggaattga

SEQ ID NO: 324 - DNA, 1578 bp, Aspergillus niger
atgcagctctcattgttggctcttcttggagcattggcgctgcccagcgctgctgttccccatgcgcgcgatgagggacaatgcaagcagaccactgttgctattcttggtggaggaatggctggtattgctgctgctcaaacgctgcacaatgcctccatggatgacttcatgatcctcgaataccgcgacaccatcggcggtcgcgcctggcataagcccttcggtcaggacaaagatgggaacccatacatcattgagatgggttgtaactgggtccaaggactcggcactcctgggggtccgcagaaccccgtctggacactggcccaagtctacaacctctccaccatctactccaactacagcaacgtgtcgacctacaaccagcacggctacaaagactactcccacctgatcgacacctgggatgacatctacgacaccgccgccgcccaagccggcgtcatgctcctcgacaacctgcaggaccagacagcccagaccggactggccctcgccggctggcgccccaaggtcgacgacatggaagcacaagccgttgactggtggtcatgggacttcgaagacgcctacacgcccctcgaaagttcctttatcttcggcgtcgcaggccaaaacctcaccgtgaacggcttcagcgacgaagacaactttgtcatcgaccaacgcggctacagccacatcatccacggcatggcgtcgaccttcctcaagcccaacgacactcgcctgctcctcaacaaccacatcaccaacatcagctactccgactccggtgtgaccgtccacagttccgacggctcctgcgtgcgcgcctcctacgccatctgcaccttcagtctgggcgtattgcaacacgacgccgtcaccttcaccccgtccctgcccgaatggaagaaagaagccatcgaaggcttcacaatggccacctacaccaagatcttcctccagttcaacgagaccttctggcccgaagacacccaatacttcctctacgcggacccctacatgcgcggctactaccccgtcttccagtccctcagcaccgagggcttcttcccgggctccaacatcatcttcgtcaccgtgacggagcaattcgcctggcgcgccgaacgccagtccgacgagaagaccaaagcagaggtgatggaagtcctgcgcaagatgttcccggagaaggatatccctgacccgattgcgttcatgtacccgcggtggaccctggagccatgggcttacggcagttactcgaactggccgcccagcacgacgttggagatgcatgagaacctgcgtgccaatgcggggagactgtggtttgccggtgaggcaaccagtccaacctactttgggttcttgcatggagcttggttcgagggccaggctgcggggcttcatcttagcagtatcttgaacggcacttgcaaggcgaatactacttgcaagggcaggaagcattacgagacgttgcacggcacgacgccattgtcggattacagcttcgtggatggatggaacggaaacagtttctatgattttaacgatgattaa

SEQ ID NO: 325 - DNA, 1083 bp, Thielavia terrestris
atggcgcagttcattacgcccggcctcaagcagtcgatcgaaaactccaaatgcgagtaccgtcggctgggaaacagcggcctccgcatttcggtgcccatctttgggtgcatgagcttcggcgaccccaggacgcttgactgggccattggcgaggaggaagcgctcccgctgctgaaggccgcctatgacagaggtctcaacacatgggacacggccaacgcgtattcgaacggcgcgtccgagatcatcgtcggcaaggcgctcaagaaatacaacatcccccgggagaaggttgtgatcatgaccaagtgttacttcgctgtcggggaggagcccgagctgcgcggtttttttgtccgtgaccagctcgcccagtccaaggactacatcaaccagttcggcctgtcacgggccgccatcttcaaccaggtcgaggcgtctctcaagaggctcgacacgccctacatcgacctcctgcagatccatcgcttcgaccggaacacgcccatcgaggagaccatgaaggcgctgcacgatctcgtccagtcgggcaaggtgcgctacatcggcgccagcagcatgtgggcgaccgagttcgcgcgcatgcagttctgcgccgagcgcaacggctggaccaagttcatcagcatgcagaaccactacaacctcctctaccgcgaggaggagcgcgagatgaaccgcttctgcaacgacaccggcgtggggctgatcccgtgggcgccgctctgcaggggacacctggctcgccggccggagcagttcggcacgacacctcgcagtcagggagagaagcagaaccagcctggctcgcacggcacggtcgagccagacctgaccatcatcaagcgggtcgtggagctcgcggacaagcatgagtggccgatttcccatgttgctctggcttggatcaataagcgggtcacaagtcccatcattggcttcagcagcgttcagaggttggaagaagcgattgcggcgagggggaaggtactgaccgaagaagaagagaagtacctcgaggagctctatcaacctaagccgatccaaggacattcgtag

SEQ ID NO: 326 - DNA, 3378 bp, Thielavia terrestris
atgcagctcacactgccttggtgcttaagactcatgcgggtgcagcgcatcttttcctattcgacatggctggacaaggtgcttctgcttgtagccgtcttgacctccatcggggctggtgttaccatgcctgtcatgaatatgatctccggtcgcatggttggctcattcaccggatacttcagcacagatgccgccacgacgtatgagatgtttgagaacgccatccggacctgcgccttataccttgtcggcttgttcttcatcaggcttgctttggactacgtggcatatgcttcgaccacggccaacgagatcttcagctccgtcaggataattgccgcgtgcggagcggacgaaaggatggcccggaggtatgcgacttgggtcgatgaatcccgccgccggggcttgaagatgtctccgctcattgcgctgcagcaggcgccagtccagtttgcagtctacagggttctcatgtcggtcatgctgatgacgacgtcgatcggcggcatcacgggtcctctgtcggccgctgctcgagctgcgggtgcggcgacagtcttctataccatcattgatgccccgaagccagacaagtctggggtccaacatcctgaagtatccgctgcggaggacatcgtgctcgatcacgtcaattttgcgtatcccacaaggccggatctcaggattctcgatgatttaagcctcaggtttccgtctggcaaagtcactgccattgttgggccatccggctcggggaaaagcacaattgttggtctcctagagcgatggtatgagatcgaggctcctgacagtaaccacccggtacgtctggcctggcgcaacggctccatcacgattggtggccgaccgttgagagaggttgatctgaagtggtggaggaggcagatcggccttgttcagcaggagccattcctcttcaacaacaccatctacgcaaatgtcgagttcgggctcatcggcacagaatgggaagacgctgaagtgaagacaaagaagcagcttgtaaaacaggcttgcgtggaagcttttgcagatgagttcatcagccgcctgccggatggatattccaccgtgataggggacgccgggatcaagctcagcggtggccaacgccagcgcttagccatcgcgaggagcatcgtcaagcgcccgaaaatcctgatccttgacgaagccacgagcagcatcgacgtccgtggcgagcaaatggtacaagcggcactggacagggtttccaagaatcgcacaacgctggtgattgcgcatcgcctaaccactatcaggaaagcggacaacattgttgttctccgcaagggcagggtcgtccagcaggggacgcacgagagcctgatgaaggaggaagggggtgtctactggaccttggctaccgctcagcagctcactctgggagccgaagaacagcttgacgacatggtgcagaatcgcgacgcgggaataagcgagaagacgagcatggccaccatcgccacaggcaccacgcttgtagagagcacggccgcgttggacggcgatttcgttgaccggacgaaagtccgcggattttggggcagttttggcttgctgctccgtgagcagaagcaccggacgaagtggtattccatactgctcctcagcgccttgggcggtggagccagccagccgatccaggcgtacctgttcgccaccgagctcactctttttcagttctggggcccttggctccaggccctggcaaacttctggagtctgatgttcgtcatgttagccctcttcgtggcgatcagttatttcgccctgggttggtcttcatccaccctcgcttttcatatcacccactactaccgtggcgagtacttccgaaacattctctccaaatctgtggccttcttcgatgcggacgaccactctgtcggtgccctcacagctcggttggccacggatcccagcctgctccaggagctgctgggcacgaacctggccttcgtgattatctcattcttgaatgtcgtcgggtgtttggccattgccttctactttgggtggaagctctccatcatcactctctgttcgtccatgcctgtcatcttcgcagcggcattcttccggatacgatatgagacacagtttgagaagatgaacaacaaggtcttcgccgagagcgccaagtttgccacggaatcgattggcgccttccggaccgtctcggcgctgacgctcgaggacaccattatccgccgctacgagaccctcctccaaacgcatatcagacaggctctctggaagtcgagctggacgacgctgatctttgccgtggcggacagtgttgccctactttgcatggcatttgtgctttggtacgggggaaacctaatgcttaacagagagtattcatcgttccagtacatcgtggtctatattgccgcccttcagggaggcctgggtgccgggcagtggttgagccatgggccaaacatcgcgaaagcatcggtggcagccggccgaatcatcaacatgaggaaccaggatcaggtcgatgggaagctcgtttctctggacgttggggacatcggagatgacgatatgggggtgaagatccagttccagaatgtctggttccgataccctacccgagatgttcccatcctcaatggtctcagcctgacgatcgagaagggccagttcgcagcaattgttggcccatcaggatccgggaagaccactatcatatctctactggagaggcaggtaacaacaggaaatcgcgacttattctactcgccgaatgcgggccgcatcctgtacaacgggtccgacatctccgatctttgcttgaggacctaccgcaaagatatctcgctggtagcccaggaaccgaatctgttcgatgggacgctccgggaaaacattctcctcggagtggacgaggagacaaccaccgaagagcaactccaccaagcatgtcgcgatgccgagatccacgacttcatcgcttctcttccggacggctacaataccgaagtgggcacgaggggcgtcacgctgtcgggcggacagaaacagcggcttgccatcgcacgagcactgattcgaaacccgcggctgctgctcttggacgaggccacgtcaaacctggacgccgagacggagaagtcggtgcaggcggtcttcgagaagaacaagaagaaccggacaatggtggtcgtggctcaccgtttggccacgattcagaacgcggatgtgatcttcgtcctggccgacggccgagtggtggaaaagggggaccatgcctcactcctgagtaggcgagggatgtactatcagatgtgtcaatcacaagccttagatagatag

SEQ ID NO: 327 - DNA, 765 bp, Thielavia terrestris
atgaggtttctatgtcttccgggagcctatggcagctccgataagtttcaagtgcagttggcaccttttgtcaaggaactgactgaagatgggactgctaccttccacttcatccatgggccctgcaaggcagtcccgccggaggggtttgaggagtactttggcaagccgccgtatttccgcttcatcgagccggacaacgacctggagaaaagcaaggaagacgacattctcgcgagaattcgagactttccgcaatgtgagacgcccgaggacaccatgcgggagctgatgcgagagggcatcgcgacgacgcaccggagcaccaacaacgcgctcaagtacttgctcaagatcatgcaggagcgcggcccgttcgacggcatcatcggctattcggagggcgcgacggtggctgccacgcttcttctccacgaacagagaaggttcaggaagaaggggatcaagcccatgttcaagtatgccatcttcttcgccggatggccgccagtcgacccggacagccacaaaataattctgagcgacgagtctgacgccatgatcgagattccgacctgccacatcattggctccctcgacccctatgtgcacgggtctttggcgctctacaatgtttgcgacccggataccgcgtacatgtttgatcatgcgaagggtcacaccttgcctcgagacaaggacactgtcaaggagcttggggatgtggttcgagaggccatcaaaacctatggtattcattcctga

SEQ ID NO: 328 - DNA, 6738 bp, Thielavia terrestris
atggcgcccattgccatcactccggacaacagctccaccggcagcccgtcaggggagagcgtcaacggctacttccatgtcagcaccgacaaccgccaggccaatgggcataccaacgggcacaccaatggctacgccagcagacacctagatggacacccgaacgggcattcaaacggagccggtaatggtgttttcaatggcgtcaatggcgtcaacggcgtccacgggccctcgggaggtttctctacttcccataagccgatgcccatcgccattgtgggaatggcttgtcgcatgccgggcaatgtctctactcctgccgagttctgggagctctgcacacgggctcgctcggggtggaccgagatccccaaggaacgattcgacagctcccggttttaccacccaaaccccggcaaggggggcgccctgaatccagtcggcgggaacttcctcaatgttgatctcgccgccttcgacgcccctttcttcgggctcacagagaaggaagccatatctatggatccccagcagcgccttctcctggagtgtacgttcgaggccctcgagaacgcgggaatccccaagcacaccatcgtcgggaaggacgtcggcgttttcatcggcggctcgttctccgagtacgagtcacacctgttccgggattccgatacgattcccatgcatcaggcaaccggctgcgcatttgcgatgcagtccaaccgtatctcgcatttctttgacctgagaggcccgagtttcacgtccgacacagcctgttcgtccagcatggtcgctgtgcatctggcttgccagagtctgcgggccggcgagattagctgtgccctggtcggcgcctgccatctcaacatgctaccggagttttggatctccttttcgacttgcaggtacgtccccgttccagagcccggcacatccgcaatcagggacaatgacaccatcagggcagtcattgtgggaaccggcttgaaccaggacggaaagacgcccggcatcaccatgccaaacggagccgcccaagaggccctgatgagacaggtgtacaagaacgcgggaatcgacccacgcgactgcggcttcgttgaagctcacggaacgggtacccgggtgggggatcccatcgaggccaccgccatccacaacgtgctgggccagaacaggacagcacgcgatcccctgtggatagggtctgtcaagtccaacattggccatctcgaaggcgcttcagggattgctggcatcataaaagctgccctgatgctcgagcgcggtttcatcctccccaactacgacttcaagcaaccaaaccccaagattccttggaaggagtggaatctcaaggtcccgattgcccagcggccatggccgcgcggtaagaaatacatcagcgtcaataactttgggtttggcgggacaaacggtcacgtcgtgctcgaggctccgccattccgaggaccaaagggttctgccgccggcggtgacgacacatctggaaaggcaggacaaggacggaagctctacgtcttcacggccaacgacaagacggcgctctcgcaggtgatgaagaacatcgtcatttatcttgaacagcgcccagaaatcttccaaaaggacctgacaggacatctagcctacaccttggggcagcgccgatctctcctgcagtggagagcggccattccggccgtcaattctttcgagctcattgaagcgattaacggcgaaaagtacactcccggaaaggagactgggccgctaaggatcggcttcattctcaccgggcagggcgcgcagtggcatgccatgggacgagagctctatgagcagtatcccaccttcagcagcagcctcgagctggccgacaggtgtctggctgagaacggtgctgactggtccctgatcgaggaactgggaagagacgcaaaaaccagcaagattaacgaggcccatatcagtcaaccgtcgtgtactgccatccaactggcgctgattgacttgctgcggtcctggggcattcgtccaaccgccgttgctggtcattcaagcggcgaaatcgcggccgcctacgccgcggagatcatcgacttcgactccgccatgcggattgcgtaccatcgcggcaggcttattcccatcctcaaacgatctcatccggagctcagaggccgcatgatggccgttggcggcagcaaagagcagttcctgcccattctcgacggcctcaaggagaaggaagcccgcatcgcctgctacaacagcccctcgagcctgaccatctcgggcgatgagccggccattgccgagctcgagaagatctgcgaggagaagcagctctttaacaggcgtctcgtggtggacgtggcataccattcccaccacatgaacctggtggcgaaggagtaccgagcgtcgctggccgacctgcggccccccgttcccaccgacatccggttccactcatccctttacgggcgcctggtcgacggtacggagctgcagccggactactgggtggagaacctgacctgcgcagtgcgcttttcggaagcgttgcagagcatgctggaacccgccggcgagcacaagcacggcgtcaacatgctcgtcgagcttggtccgcattccgggctccaggggccgatcaagcaaatcctgaaggagatcggcggcagcgcccttaagatcccgtacgcgtccgctctcgtacggaagcgtgatgcggtagagacggcgctggaactcgctgcggatctgttcaccaggggcgccagcctcaacttcggggcaatcaacttccccaagccgaccaagccgcccgtgctgctgaccgacctgccgcggtacccctggaattactcgtccaggtattggcaggagtctcgcatgacaagagcacacaagcacgctcctggcggccggagcgacattctaggcaccctggccaactactccaacgacttggagcccacctggcgcaacattgtccggctggatgacctcccctggctgcggcagcacaagatccagtccttgactgtctttcccatggccgggttcattgccatggccctcgaggcagcggctcaaagagcatccgcgaggggctgcccgttcgacagtttcgagctgaaggacgtctcgattaccaagcctctcgtcattccagacaaggacatcgaggtcacgctcaccctcagaccacgaaaggagagcggtccctcctcccctggcagttgggacgagttccgcatctgctcctggtcgagcgaacagggctggaccgagcactgcgttggtctcattgcggctctggaagcggatgtcaacgaggtcgacagtgccaggcgcgctcgagacgcggaggctcgtctcaagaccatcctgtctcggactagccagccggaagcggtgcctgtgactccacaagccatgtatgacagcctctcgaagctgggcgtggcctacggggctcttttccagggagtaaccagctgctacgcatccgactcccacgcggtggggaaccttgtggtgccagacgtcgcaaaggagatgcccagcggttatctaaccgatgcggttctccagccggcgttcctcgagtctctcattgagatgtattggcccattgtcggagctggtcgacgtcccgtcggcaccatctatctgccctcgtctgtcgaccgggttactgtctctctcggcgtccagcggtttaccaaggaccctggcagcgcggtccgcgccgtttgcgaaggcgagatcgccgctggttcgagccccaagccagccaaggtcaacgtggccgccgtcacgggcgacgacaagcttgagacgctcatctccctggatggtctcaccatttcccccatcctcgacggcgagacgcaggcggactccgccgcagcgagggaactctgctataagttggagtgggatccgatcctcgagaccgacgacgagagcgtccaagaccttccaacggacgcccaggtcgtcatcatccacgaggactccagtttccaaagtctcgtggcaatgggcctggcaaactctctggagcaggccactgggaggctggctgactttggcactctggaaaccgtcgacgctgccggcaagatctgcgtctttctgagcgagctgcaccagccgttccttgcgacactcacacccgcccagttcgacggcctgcagaggctgttgacgtccgtcgagggcgtactgtgggtcgtgcgcggagcgtacgacaactcggcaaacccagatgccaacatggtgaccggcttgagccgaaccatccgatcagagactgcgctgaagtttgctaccctcgatctggacgccgagtcaccgctctcggagcttgagacggccgacgcgatcatgaaggtcttcaagttcgtctttcactcgggttcctccatgtctggagaactggagttcatggagagaggcgggcgtttctacacgcctcgaattgttcacgatcccgagatggacgagtacgtccacaagcagacaaacccatccgctctcgagcctacgctgtttggggaggaccaccgagctttgaagatggcactgtcagcgccgggcgcgttggagacgctccacttcgttgacgacccggctgctgagcagccgctggaggccgacgaggttgagattgaggttaaggccatcggactgaacttccgggacggtatggctgccaaaggccaaatccctctgggcagttgcggaatcgaagcaagcggagtcgtcaccgcggtgggaagcaaagtcacggcctaccgggctggcgatcgtgtcgcggcgcttaccacaggtgcgtttgcgacgcgaacgaggacaaaggcggccttcgccttcaagatctcggcggacctcacattcgaggctgctgccagcctgccgctcgcgtatgcgacagcatactacagcttggtagagcttgggcggctcggtgaaggcgagactgtcctcatccactccgcggccggcgctgttggacaagcagccgtctgcatcgcacaaatgatcggtgctgaggtctttgtgactgttggaagtgcggagaagaaagagctcctgttgaaggagttcggactcccggacgagcgtgtcttctacagccgcaacagctcctttgcagacgcaatttgccgagatacgcaggggcatggcgtcgacgtcatcctcaacaccctcaccggggacgggctccgcgagtcttggagatgtctgaacaagttcgggcgcttcattgagcttggccggggagagaatgtctctaaggcgcggctggaagtcgacagaatcgacagcaacgccagcttcatctgccttgacatgctggccctgatctctgagcggccaaagaccatcaagcggctacttgcggacgttgcgcagctcttgaagtacggcaagatcaggcccgcagttcccatcacaagattccccatctcggacgtcgaaacggcgttgaagacgcagcaaactgggaagtcaatgggcaagctcgtggtggttcccagtgcgactgacgtcgtcaaggctgtacaggctgctcgttctaggaaggcgaagcccctcctccgctcggatgccacctatatcctggtcggcggcactggtggcctcggccgcagttttgctaggtggatggcggcgaagggagcaaggaacatcgtgctggtctcgagaagcggctccgtaacgggcagggtaaaggagctcgtcgacgaacttggcgcaattggcaccaacgtcgttgttcgccgctgcaacgttgtcaacaagagcgaagtggacgagcttattagctccatcctcggcgacctgccccctatccgcggtgtggtgcatggcaccatggtactcagggatgtgcttttcgaaaagatggcgtgggaggattacacgcaggtcatcgagggcaaggtgcaaggcggatggaacttccaccacgcactcgcagactcgccgctcgacttcttcgtggctatctcctcggccgcaggcgccgtcggcaaccgcgggcaggccgcctacagcgcggcgaactgcttcctcaacgcgctggtgcagcaccgtctcgcccgcggcctgcccgcggcctcgctcgacctgaccgccgtttccgactcgggctacctggccgaggacctcgagaaggcggccgaggtggcgaggaacctcggcagcgacagtatctgcgagagcgaggtgctcgcgctgctccaggccgccatcgacggcacgatggcctcgacctgcaacagccacgccatcaccggcatgcgcatcaccgcgaccatgcggccgttctggaccgaggatgccaagttcaaggcgatgcgcatcgcggccgaggaggcggcggccaaggacgcttcgctcaacgccgtggtgtccttcaatgctgccctcaagcaggcaaccacgcgcgccgaggcggaggatgtcatctgccgcggcctggtcgacaagatctcctcggtcctgatgatggaagccgaggagttggacatcaccaggtcgctgtcccattacccgctggattcgctggtggcgattgagatccgcaactttatcacgcgcgagttcgaggcgaatctgcaggttttggagctgctgtcgagcgggtcgatccagacgcttgcgaagggggtctgcgcgaagagcaagcttgttactttctcttag

SEQ ID NO: 329 - DNA, 1794 bp, Thielavia terrestris
atgcccgagaagtgagcctcagctcagccagtgctgaggctggaagacgctgggggacgcttggaggactgcgcagcgcgcgagaccgcaggatcggtcaggagggcaaaacaacaatactccctgtcgccggtcggcagaggcaccatggagtctgctctcaacgggaagacgccgagcgcacaagtcgtcgggacgacttcgctgtacgagaatggccaaatacggttgattcccgcgccaagtccagatccgaaagatcccttgaacttaccggagtggcggagatgggcggccatcgccagcctgtgtttctccctctcggcggagatcattgttggcagccttatcccagtgttcctcctctattactccggggtcgatgtgcgcatcctcaacgcatttgacttccgggccgtcagcggcgggtctgcgacgggcgtcaaacctcttgccatcatcccacagggcgtcgtgcctgccgacattgggaaggtctccatgctggcgaccattccgctgctgagcaacggcattgccagctacttcctcgtgcccttgtccattggcatcggacggcggccggttctgcttttcgccggcgcctgcgcttgggctggtggtttcctcgctgtcgcaagcccttctctagatgtccacttggctgcgcgagcgatacaggcgagtgtcttgagcacagagctgcctccgcctgacatggtcttcattcaccagcgaaacaaagccatggccgccgtggttgcgagtcaagggatcctcattacgggtttgggaatcctcacgccgtacctcgcctcagttcacgactggagatggatttactatatcacctctggtttcgggatcgtcgcatggcttttgttagtcgtgtttctcccggagacacggtggacgcggtcgaaagaagagctaagcggtcagcagttctatcccatcgaaccagggaagaatcggccggaaatcgactatggaggccgtcctcccccatcacagtggtcgtacatggcattgttccagcacgggtttgagtggagacaggcgggcatgtccatgctcaataccctcaggaccactccgttccctgccattgtctgggctaccctggccaacagcattttcgtcattgtcaactcggcggcgcaacagattagctcctttgccctcctagcacagggttggcagttccagtataccggtctgagtgtgatgccattcatagccgccaccggcctagtttacatattcggcggcccagtcgccgatcgaatctcgaatgccatcgcgagacgcaacggcggtgcccgggagcccgaacaccacctgctcaacatggtcttgcccctcgtgtccggcctggccgggaccttcatattcggctgggcgggccagaccaacgcctactgggccgtcttgatggtgggatccttcctcattatcttcggctctctggtcgtaatgtcggtcctcaacgtttttgtggtcgagagttaccctatgtgggccggtcccgtgctggtcaacgtgtcgagcctacgcatcatcattgccttcttcctatcgagtcagtccacgacgtggatcgccgagaagggcttcttgaacaccttcgttatctattccgaggtcatgatcgtcatctccttgggcataccggttctgtatttctttgggaggaagatgaggcaatggaccgccggcaaagtgaaaacgacggctcccagtgacgtcttgaagaaggagtttgatgacagcttgagtgagaggtcggcttga

SEQ ID NO: 330 - DNA, 870 bp, Trichoderma virens
atgaagatcctctgccttcacggtagaggctccaacaacgagatctttcgggcgcagacggcagccttccgtgcagatctcgatgactttgagtggacctttgtgcaaggcacggttcgacataccgaaggcaactggtccctgtacacagcacaattctcgcatcttccactttacacatactacaacccttttgatcctgcttctatcttgcagactcatgacgaccttgcgcggattatagtcgaagagggcccattcgatggtattctgggctattcaggcggtgctgcgttagcagcagagatcttggctcaggcaacctatgatgatccctttgccatggaacgaccgtttcgatttgcagtcttcatcaacggagcatctcccctgcgctgttttgctatgaaggacgcccaagtcatcgaggacatcgtcgtagattccgcacccatgaccgagcaggcagagaatatgtttcttcgtccgagtgcgctgcgaaagaaggacggagtcagcgaacaggaccaggtcgaccatgcaaaactactgtcgttgctcaagaaactcaagggcaagaagttggtcgatggaacaacgtttctatccaacggaacgcatggcctttgtagatgggaactacccgcagacggtgcgccactgattgacttgcccacgctgcacatccggagcaccgagagcgacgagagtgatccccacgagggtctccatttgctacgactctgtgatcccggccaagcacgcgagttccatcatggcagtgggcatgatttccccagaggtcgtaaggaaatgaagcacattgcgagactgattcgagaggtcgctgaagctacaacaagtctataa

SEQ ID NO: 331 - DNA, 1584 bp, Trichoderma virens
atggctaccatgagcgacgtctgggttggcctgccatggccagtacaattgatcgcgacctgctttgtcctcactgcaactctgttgatcacgactcgcctcaattcactctcccattcatggccagcggcagcaggaaaaggccacgaacctccaatagcgccctactggcttccaggaatccagcatctggcagccttccttctcgatcctgcccacactttccgcacgacccagtcgaaatacaaagattcgccttacacattgctcatggggaacgtgaagttccacgtttttggttctccatctgccgcgacccatgtctttgcacgctcgcgcacgtttgcgtatgaaccggtgaccttgagcatgctggagaatggactggatctgcccgtggccgaccgagtttactttcaaatcggtctggatcgagcaaatagtgcagagcatgcgaaggggttcgtggtgcaaaaccataatgtctggttgcgatacttgtcaggcgagccgttggacgacctgatgcagctattcacacgccacttccaccaaatcctggagcaacacctggatatgaagacaagaggctggcagacagtcgatctataccaagtcctgcgcaaagtcattttcgacacctctgtcctgacgttcttcggtccccatcttgctcagatatggggtcctaccatgtggaaggacttctgcctgttcaacgatgccacctatattggtgtcagaacaaatttggcgtatgtcttgcagccgcgcgctggccgcgcgcgggagagaatgctacgcgcctttgaacagtggttaacgcaccattcagagggagactggccggacaaggacaaatattggaacgaggaatggggcgcaaaaatgaattgggaacgtgaccatctggcgcgacaattcggcctctccctccgtggacgggcggccatgcaggcgagcttcctgtttgcaatcgttctgaacgccgcgccgatgagttcctggtttacctgggtggcggcgagtaattcagatcgcctggcaaagtgtcgagtcgagtcgtccaagttcttgcgaccgagcaaatcaagccgcttcgatcacgaattggacatcgacgccacgcaaatgagaggcagcaacttcatgcaggcgttgtggaaggaagcgttacgcataggcacggcagcctcgccagcacgtgtagtcatggaagacacagagctggaagggtatgtcgtaaggaagggcagtgtgatcctcatgcccactgcgttgctccaccatagcgacttgttcccgagagcggaccaggttgacacggaaaggtggacaggcgaggatgccatagtccaacagcggagtaaaagtattcgcacatttggtggaggtatgggcatgtgttctggacggcatgcggccgagcaggaggtcatcggtctggtctcgaagcttattacgctgtttgatatcgagttcgaagactcgtggaagaacaagttccacttcgacccaagaagtctcggaattatgcatcctgcaggtcctctaatggtacgcctgaagcggagagtattatga

SEQ ID NO: 332 - DNA, 7917 bp, Trichoderma virens
atgtcgaatcatggacctgacgaggccatcgccatcgttggcattgcttgcaagcttccacaagaagcctcgaccgtcgaacgcttttggcaattcctcctgcaaggacgaagcgcacattcaccatggccagatgatcgcttcggagccggccactatcatcccgacaatgagcgagtcggaacacactcggtcaaaggggcgcatttcttggccgagccgcccgaatatttcgatgcaccctttttcggcatcaccaaaggcgaagccatttgcatggaccctcagcaacgtctggtgttggagaacgtctaccatgctctagagaatgcaggaatcccactctccgaagccaatggatccaacacgtccgtgtatgtgtcgggcttcaatcacgactatctctccatcataaatgcggatgcggagagccctttgcgatatcgtgcaaccggattgaccaactccgtcctcagcaaccgagtctcttggtttttcgatttcaaaggtccaagcatgaccatcgatactgcctgtagcagctccgtagtgacacttcatcaggcgtgccagagtctacgtagtggcgagagcgacatggccatatccagcggggtcacggtcttggcttaccccaacgatgtggcctccatgtcttatcaaggattcctatcgcaagacggccggtgctttagcttcgatcaccgtgccaatggctatgctcgtggcgagggagtcgggacgatcattttaaagcgtttcagtgatgccattcgagatggcaactctataagagccgtcattcggggcactggtgtgaatcaggacggccgaactcctggattgaccaacccggatagtctggcgcaggaaaggctgatcaggacggtctatgcaagggcaggcttgagtgtcaacaatacggccatggtcgaggctcacgggactggtaccgcggcgggtgacccgatcgaagccaatggaattgcgagagccttctcagctcggccaaggaatctccctccgctgtacattggggcttgtaagtccggcattggtcatttggagggcgcggcaggcgctgcagccatcatcaagtctgttcttatccttgagaatgggatcatccccccaaacgtcaatttcgaaaaagtcaatccgaagatcccggcaacaaaatggcggcttcaattccctcttgaaccaacgccttggcctacgatcggcttgcgcaggatctctatcaattcctttggagtcggcggtacaaacggccatgttgttctcgatgatgcttttcactatctccaggaccgagggttgaccgcgactcattatacacgacccttgcctccgaccaacgcagatctcgatctcgtaaacggcgatagattcaacatcaccaatggacatgtgaatggtctcaccaacaaccatcccaacagtgctggagatagcaatgcccttgccggagactggagggctttcgatccaatcgagtgtccaccaaagctcgttcccttttctgctttcgatgaagaaggctgcagtcgcgcagcaaaaacacatgcagaattcctccatgccaggcccgaatcgatatccgactccgaaagtttgacctatctgaacgatcttgcccatacaatgagtcggcgctcgaagctggcctggcggagtcacgtattagcaaggtcgctggtcgagctcgagacacgtctggcttcgcccttgcccaaaccgctgcgggctcgcaccactgtcaacgtggcctttgtgttcacgggtcagggagcacagtggtatggcatgggacgtgagctactctgctacccggtgttccgtgagagtctggctgcgtgcagagtttatttgcagatcgaatgtggctgcccctgggatctcctcgacgagctcgccaaagacaaagaacatagtcgtcttgatcaagcagccttggctcagccggcgtgcactgcccttcaagttgcgattgtggatttgttgcaatcgtggaatatccagcccagtcgtgtcgtgggccattcctccggcgagattgctgctgcttactgcgctggccttctgactcgcgagtcggcctggcgagcgtcttatttccgtggactagtcaccgggaggcagacgaccgagaccaaaggcgctatgcttgctgtcgggttgggtcaagaagcgctcgccccttatcttgaccgaattcatgcccaactctctggggaattagttgtggcatgtctcaacagtcctcgcagcagcaccgtctcgggtgatgtgcataaagtcgaagctctgcaacaagtcttggaggctgaagggctcttcgcgaggaagctcaaggtcccaaatgcctatcactctgcgcatatgcaggaattcgcagacgaatacgtccgtctggtgggtacgctccacgcgccgagcgagccacctcagtcacctgtggtcatgatctcgagcgtcacgggggaagcagtcgaaggccgttgtctctccatcgactattgggccaagaatctcctaaatccagtgcgtttctccgatgccctggcaggcctttgctttagccgcacaacccaaacacaggccaccctccgtgcagatgctgctggagccaacgtctttgcggatgttttgattgagcttggccctcatggagcattgcaaggcgccataagagatgtgctcgcagctcatgccgagggcgttgcggtagcattcctcccggcactgaaacgcaatgcccctggggcagacgtattcctgaacgccataggctaccttcatgcccgcgggtatccgatcaacgttgatgacgtgaataacagcgctgatacgactggtggaagagggtctcgcccattgcgtatacttcctgaacttcctggataccagttcaaccattccaacaagttttggtatgagagtcgcttaagccggaactatcgcctccgcaaagagatcagacatgacctgttcggtgctccagtacccgactgggacgcgatggctcctcgattccgcaactttctgagaatctctgagcagccatggctacgagatcacatcgttactgataacatcatcttgcctggcgtaggctacgtgattgcggtaatcgaagcagccagacagctggctgatccaaatgtacaattgagcggcttccggcttcgagatgtcaacatgaaacgtgcattgatcgtgcccgacacgaaagaaggggtcgaagtaatgttgaatttcaagccagttgatgagtccagtgtcggcacttcggcttattggcgtcggtttcaagtagtgtcctataacccaaccgcgaacgactggatcgaacactgcactggatacgttggcgtggatcatgagacatctgcccccaatccggtcgaccagggacgagaagcccgacacgacgcagaacgctggcacgccgctttcactgctgcagaagagcagtgtcaatctccctgggacttttccaaggcctatgagcgattggcaagaatcgggctgaactttggaccgctgttccagaactgctcggctgtccggggtacctttgaccatggtggccagactatgggcacagtcaccgtccccgacgttgcaagtgttatgcccaagggtatcgtatctccgcacttgatgcatccagcttgcatggacagcttgatgcactttgcgctggccgcgatcatggacgccacaggaaagagcaacctcgaagtggccatggtgccgcggttcatcaaggacatttggatttctgcggcaatgaaccctgagcctggtcatgtctatcgtgctcacagccagacgcgcaagattgcgtttgagaagttctcgacagatgttgtcgtctgggatggacccactcaagaaccccgtatctcctggagtggaattgaagcaagccccctggattccgccgcacagagctcgctcggcgcagaaaagatgtgtcacgagattgaatggattcctcacgtggatatgtatctcgaaggaggcgacgtcgcttcgttcgctgagatgcccaagcctgatttggactcagagcaagctgcgatcgagatcgattctcgtatgcagctggcctcggtgcttcttgtcctggacgcactggaggaactagatggcaaggtgccggccgctgctcaaggtcatctctatcggtatttcgagtggatgaagcacgtcgagagtgatctccagctcggcaaggtgatcggtatccaagcctctgaggttgagcgactcaaacatgaccacgctgcaaaggtggagctatacaaacaggttgcttcggacactgcgttcggtgagttggcagtacgaatgggcggcaacatcgtgcccgtcttaagaggtgagacagacccgctgcagctcatgttcgctgaggatgccatactcgatcgagtctacagacgaactgcgaccttgaacgacctgccagcgcaacagaaggcctatttgaacgtattagccaagaataaggccaatttacgcgtgctcgaggtgggtgccggcactggctcgtccactgcgcaagtacttgatgcccttgctcccatcgcagatgatggggtgtccattgctagtagcgtgtcacattacatgtacactgatatttcggccgcctttttcgaacaagcaaggcagaaattccagccatacacgaacatcatggagtatcgagttctggacgcagaacaagacatcgccaagcaggagagcttcgaagtcaggagctatgatttgattgtagctcagaatgtcatccataccaccaccgacctcaccaaaacactgagtaatcttcgccagttgctgaagcccggaggccgcctgcttctacaagaaggtataaggcaggattactactggtccgggctatcatttggccagctgtcagggtggtggagtggcaccgaatccatgcgtcaatggatgccatgggtctcatccaagcagtggaatgaagtcctcgaggctgctggttttacaggagcgcgcttcgaacttcccgatagccacaatgaacagctccatagccagagtcttttcgtggcccagaacgcttctgtagacgccaacgagcccggtcccatgtggaagaacgttgtgctcgtcacactccctagcttcgagcgaagcaacactcaaagcttgttgcaagacatcaaagacaagttgaacgagaatctccggttccagaacatcaggatcgtatccctgctagaattggaagggatcgagtatagccaaagtctctgcattgttctagcagaactcgaacgtcctgtgattgcagatctgtcccaggccgagtacgagggtgtccgcaaaatgctgatcgagactaaaagcatcttgtgggtaactggagatgagcttttctgcccccagtacggagccataaccggcctgatgcgtacaaacagatgggaacgtgacttggacgattccaacctggtcacactgaaaatctctgagcctcgacctgaaaatacctcgctgagtgcgtcgattcgaaggctgtgtgaggcgcagttctcgctcactctcccagttgagaacatgaatggcgagttcatgcttcaagatggccggatctggacgagtcggctccgcgaggccattcgtgcagatgaatacttgcaaacagctctataccgctcagaagcagtcccaacgctggccagggatgctggcaggcccatcaagctcacgacaactgttccaggcctgctagaaaaacttgagtgggtgaccgacgagacgtacaatgagccactctccgatacagaagtagaaatcgagatacgagctgttggcctcaactttcgcgatctcatgattgccatgggggagcatacggcgtactcgatgggcagtgaagcagctggcatcatctctcgcgtgggctccaaagtagtcgacttcgctcctggcgacagggttgtctacatctgtggcctagaccatgtcgggtgcatgcacacctatggtcgtttggatcaatcgacagtcgccaaggtccccgatgggctcagtttggagatggctgccggcttgcctgttgtctatgcgacagtcatttacagcctacgggagacggctcggttgatgcccgacgaaaccattcttatccatgctgctgccggtggggtgggccaggctgcgattcgttacgctcaacatattggcgccgaggtgtatgtaaccgtatcgactacgttgaagcgagacttgataattagggagttcgggattccagacgatcacatcttttcaagccgcgacctcacattcgtcccgggcgtgttgcgtatgacaaaaggcagaggtgttgacgtagtcttgaattcgctctctggtgaggcgctgcgccgctcatgggatctggtggcacccttcggtcgtttcattgagattgggaagaaagacgccatgatgaatggcaaagtggatcttcggccctacttgcgcaacgtgaccatggcgagcgtcgacctcgtttctatgatgaagaacaaaccgtttctcatcaagatgctgacagaggaaacgatgcggctgtggaaagagggtgtggcactgcctgcatcaccaactacgataatgcccatgtcgcaggtggtggatgcacttcgcattctccaggccggcacgggaatgggcaagattgttctggtgcctcgggaggatgacgttctgccactccttccaccgtcaccggcgccgcttggcttttgtcgagatgcatcctacgtgctcagtggtggccttggaggtattggacggagcgttgctgcatggatggctttgcgaggcgctcgaaatttgatcttcctgtccagcagcggccgcatcactccagccgtcacaacgatgcgcgagactctcgaagcagacggatgtcgtgtgcatatcttcacatgcgatgtcagcgacaaggaacagctacgtctcgttctcgaacaatgcaagaccctcccacctataagaggagtcgtccaagcagcaatgaagctaaaggacatcatgctcgagaacatgtcgcacgaggaattccagctggctatcagacccaagattcaaggttcgtggaacctacacgaacttctgccccaggatctggagcatttcatcatgctgtcttcagccacgggcgtcctcggcaaccgggctcaggccaactacgccgcaggaaacaccttccaggacgcgctggcgtacttccgtcggcagcaaggtctagcggccacgacgatcgacgttggcgcagtgctagacgtcggatacgtggccgatcacgcggaccgcctcgccatgacaaaatacctaggcagtatgatgaaagtgctgcgcgaagaagagttgcttacgcttatcgagtacggcatgaacgctgctctgcagtcgcctgcacagcttgttacgggcttgactccgttagacaagcatcgtgctcgaggcgtgccgatgctcagttacatgaacttccctctcttcacgcagctgcggcggctcaatacgcagcaagacggcgcagggacgaccgggggtgatggacctgacgttgaagcgcggcttcgagcagctcggactctggatgaggcggctcagattgtgacggaatcggtcattgataagttgtcttccttgctctcaattgcggtcgaggatgtggatccggcgcggaccatcagtgccaatggcgttgactcgcttgttgcgctagaactgaggacgttcatggcgagaaaggtcaaggcggatgtgcctgtgttggaaatcatgggctcgttgagtcttgctcagctgtgtaggaaggtggcatcgacgagcaaagcggtcgagttgctaatagcaggaggcaactaa

SEQ ID NO: 333 - DNA, 867 bp, Trichoderma virens
atgtcccacaacggcgagcccgacccgctctaccgcgagccctatccccttaaccgcgacttgctcgcctccgcccgcctgcacctccagcacgccgtcttcgtcaacggtctaggctacctgctgcacccggccgtccctatcgggcccgcctcgcacgtggctgacatcgccaccggcaccggcatcttcgccctcgccctcgccgcggcccaccccgaagcccgcgtcgaagcctccgacatctccctcgcccaggtccccgcccagcactggtggcccgccaatgtgacctttgcggtcctcgacatcttccaggaccccttgccggcctcactgctcgcgcgctacgacgtcctctgcctccgccacttcgtctccctgcagcccggcgatccgcgcccgctgatcgcccgcttgctggccatgctgcggcccgggggctatctgcactggcaggaatgggacctgaccaccgccgccgtcttcgccccagacggcacctccacccctaagatgcaggcgctgatcgattacatcaaacatccctcccgacacaccgcccaggccacctgggttggcgacttgcatcagagggtcgccgccggcgaggtgcctggcgtggagctggtcgctcacgaccgtgtccgcgccgctaaggccgccgtcgtcgctatgcagcaggaactcatggcgctgggcaccaaggaggtagtcgccagtctgcgggcccgcgagggcgaagcgagcgtcgaggccgctaagttcgagaagatcgcgcacgacgccgtcgacgagtgtctgagcttggggaggggccctgtgatcgatcaggagatggtgacgtgggtgctgaggaagaagtga

SEQ ID NO: 334 - DNA, 1503 bp, Trichoderma virens
atgctctcttccgaccgcacccaatatactctggcactctggctgacgcccgtcgtcctctatgtcgtgtacgcgtggctcaaagtcatcaccggcgccttctttggccctttgagcaaaattcccggccccaagctctgggccatctcgcgccttcctcgtatgtacatggaatggcagggtgaggaagcagctggagtcgccgcgttgcacaagaagtacggcccggtcgtgcggctggcgcccaacgaagtgtcgtttgctggtggtgctcaggcttggaaagacatttatggctaccgaaagaacgtgggccaagagaagcatccatatcgttcgtcggcgtcgtattggcctccggccaacggagccccgagcatgattcaggccatccgtgacgaagaccaccagcgactgcgcaagagtctggccgtctcgttcagtgagaagtccatgaagctgatggaaccacgcgtcaagggctgggctcggcttctgcagaccaagttggctgagcgcggtgatgctgcggtggatatggtcgagttgtttagatgtgcaactttcgatgccatgggtgacctcgcgctaggggacgacctgcaaatgctgagaaatggccgtctctccgactacgtccatgcagcttttagtggcattcgaaccatcatccgccttcgggtcctctccacgtacaattccttcacccgctggctcgttcaagactgtttcttccaaagcgcattcgtccggaaggccgccatggaaaatcttcgctactccgcggaccgtgtggatcgtcgcctgcaagaaccagaccgagaccctcccgatctctggacaaaacccctgactggtatcgacggcaagatgtccctggacgaatatcactccaccgcacagcttctcatgactgcgggcaccgacacttcggcgataggcttgtccggcacactatattatcttcttaccaaccccgactgcctcgccaaggtcactgacgaggttcgctccgccttctcatctatggacgacgtaacctacgaaaccctcgcccaactgaagtacttggacgccgcgctgcaagaaggcctgagactctacccaccggtgcctaccggcgcacctcgcgtcactccgatgcctggatggtccatcggcggctactggatcccaggtggtgtgaacgtccacgcgccccactatgccacctctcgccttcccgcccacttcaccgctcccgaatctttccacccagagcgctggctgggcgacgagaaattccaaaacgaccggcttgatgccgtccagccgttcaacctcggccctcagaactgcttgggtcaggcttttgccatgaacgagatgcgcctcttcatggccgctgtgttgctccaattcgatctacagttgtgcgaggacccccgagcctggttggatcaacgagtgttctccatgtgggagacgaagccgttgatgtgtgtcgcgaccaagacgagctga

SEQ ID NO: 335 - DNA, 1569 bp, Pseudogymnoascus pannorum
atggaaacaatagccttcttcctcgacaaggttcaagaatggtataagccctacaatcttggcagcaaattatctattccgacggcgcttctggcaatagctgtcttgcggctgctattctactcctctaacccaaagcacaatgcagatatcaaaaatatcccaattgttggtaaagagtatggaacgtgggaacagaggagtcgtgcgtttgccagccggggcaaggaatttttgaatgaaggataccgaaagtacaagggcggagtatttcaagtggcaacaactgaagggcctaatctgtttgtcacaggccggttcatcaacgaactcagaaatcagccagatgagattgttagcttcaacgcaagggcagaagagcgaatgcttccacagtattcactgatttctcagaagaatcttctaggtgtacattctgtcaagggagatttaacgccaaaccttgcacgcttgctgcctcacgtggtagatgaaattgaatcagcagtggctgaggatattggagattgtaaagaatggacatcgctcgaaatatacggtcaggtagcacgggtggtatccaaggcaggattccgtatgttcgttggccccgatttatgccgcaatgaaacatggatcaaactttccatcggctacactgcaactacatttgctggcgctgaggcaataagaaaatggcatccctggctccgacccatagtctaccgatgggtgcctcaactgcaggcggtccgcaaaatgaaagcaaatgcgctcgctctcctcacccccatcatcaatgcgcggaaagctgcaaattaccaagcggacgaagagaagccggaagatatgctccagtggatgtacgacaagtgcagcgatgcggaaaagaatgactatccatatcacctggatcttcaacttgttctcgggctcgccacaatccattcgacgacgatgcttacgacaaatgtgttatatgatctggtaagtagacctgaatatatcgagccccttcgggaagagattcaggagatactagcacaaaatggggggatcttcacgaaacacgccttggaacatctgaagaagatggacagctttatgcgtgaatcccagcgctggaacccgatgaatttctctggatttgttcgcaagatcctagtcccattcacactctccgacggaacatatattccagccggtaccaattttgaagtacctgtgtacgcaatgtccagggaccctcagatctgtcctgggcccaaccccgatatcttcgatggttatcgcttctacaacgcgaggaaccaaagcaaagatgaggcgaatggccatcaactggttactgtcacctcgtatacgatgtggtttggatatggacatcatgcctgtcctggccggttctttgcgagttataagatgaagcttatgctggcaaatatactgctcaactatgatgtcaagtttccggatggagaggtggagaggtacaaaaatatggagtttgagacgaataactttccagatccgagcaaagtcttgatgtttaagaggaggagggggtag

SEQ ID NO: 336 - DNA, 1212 bp, Pseudogymnoascus pannorum
atggctctgcctctcaacgctaccccggttttcctcctcctccttgtgaccctctgggccgtcattgctctatactatttctccgccatcaacggcttctttggccaattcggagccgccctagattctctaacacttctggactccactcccttccaattcctcaacaccaatggcacctatcctcgcatcgactctcaattgcgcgcagtattaattttcggttgggtctttgctggcaatggctcaaatccagaagcttcgttgactgggtttttctatcttggaaattggggtgtgagctggttcctggtggtaatggagacactgaggagcggcaacaaacacaaattaatcgcttttgattcaattctcggcgtcttggtcttcaactgggcccatccggtcatcatgccgatctatttatctctccacctcttaacctccccgacagcatcgctcccaacccggagcaacgtcgtcatagactcaaccgacctcctcgctctccctctgagttttgttattgcctataccatgccaattacgctgctctctgttccgccttccgcctttggcatggtattcaaacaaaacatcatggcgtggtatcaacaatggaacctctacatcggcctcacccactttatgctagcctttactctccgccggctcctctccagttctcaacgcgattctgccgggaatctcagtccaaggtcgattcataaagaagcgtccactaaatatttgcgacttctccacaccacatacattttcgtcttcgtcatgggcagcatcccctatctaaccactatgacgatctcttgcacagcttccatgtggccttccatctttgcccctagtgtcgcctcgtctctcacgctcgccaatatactcattccgccaaatcccttctccgggcggcagtctgtggatctaatccaaggcgccgtctggattatccgctgggagaacgcgctcgtttcgctcataatgggagtgtgggtgctggctctgcatcgcagggccagatgcaaccagggctcaaaggtggaatggaatgagattataggaatcgtgggaagattggtggggtatacgttggttggcgggccaagtggagtggcggtggggttgatgtgggagagggattgctttttattaaacgcggatgaggcggaggcggagaatatgattagattggaataa

SEQ ID NO: 337 - DNA, 1131 bp, Pseudogymnoascus pannorum
atgtacgggcccgacgcccttaattttctcgggcctctgatatcctcgcaccgatgtgggaggagcgggctcggtgatactggtgatgccggtgccaagcccggaaagctcattccaacatggcttgcacaggttacgatggcggacaagctagtcaaaggctctttggaacgaaaacgcaaagctaccaatggcatgtttgccatttatgctccagaacagcaactgagtcttaaggaaccaatttttacgatgagagtgctatgtctccacggccgcggctcgaataacgagatctttcagatgcaaacagcatcatttagagcagatctagatgacttcgaatgggaattcgttggaggcacgaccctacataccgaagggaactggtctttacacacagctgctttttccaatcttcccctatacagctactacaaccccctgtcgccatcttctatcattgaagccgaaaatgacatcctccgcatcacggaagaagaaggaccgtttgacggcgtcctaggctactccggcggtgccgctcttgcttcccagattataattcgcgacgccattgcccatccttttaagtctcccaatgaatttccatttcgcttcgccattttcattaacggtgcgtcgccattgcgagctttccgcctctcaggtccggctgattgtctcggcgatggcacgaccaaccccgaagatttgataaaggaggcagagggtatgttcctgcgtgcatcagcaacacgaaagaaaaatggcgtaaatgacgaggatcaacctgatagggaggcattgttgcgtgcgcttgcttccttcaaaggacatgtgttggacgatggcacaccgtttctgacagatggggagtatgggctgacgaggtggaacgccagaacagaaattgtgaaagataaaggagaaatcttaatttcgatcccgacgctccatataaggaatccggcggaagaggacatgcaccatggagagcatttgttgaccatgtgtgagccgggtctgaggagagagtaccaccatggctacggacatgactttcctagaggaagacgagaaatgaagaagattgccgagttgattagagagactgcagagagagcttag

SEQ ID NO: 338 - DNA, 4641 bp, Pseudogymnoascus pannorum
atggaggcctccacaagacttgatggtatttttgaaaatgttaggccaaagagtactgcacttactgttgtcctgatggcgatttgcttggtgtcggtggtattactcgtgacatggcttggaactttaatacgatcatggccctcgaaaccaggcttaggaaaggaaccgcccgtcgcgccatatagcatcccgtatcttcaacacatgatatcgtttttattggatccatatgggcttcttcaatctctaagggagaaatatcccgaatcaccctttactctcacaatgatgaataccaagttccacgtattcagctccccagaaactgcggcaaagatattcggcaaatctcgagagtatgcctttgagcctgtgattgccagtatgatgcaaaacggcgttaatctgccaccacaagaccttgcgaagttcacactccataagcgctcccctgggtcccattccggaaaagaggatgacacaggagaatttgtttctttaaatcacggcgtgtacattaagtatttatctggaaagcggttggaaaatatcatgaaagtctacttcaaacatttcgcagccgtattggcgacaaatccaatctacaacagcattagagaagattggaagactgtcccgctaaatgcgacactgcaaaagataatattcgacacctcagctgtcacattttttggcacgcgtttacagcagctttggcctgatatgtggcgtgattttaaactctttaacgatgctgcatatgcaggagtgcgctcgaatatggcttttgttctccagcccagagcatatctagctcgcgagagaatgctgaaagcattcgagaaatgggtggattgcgaagttgaagactgggaggaagccagcggcatctggagcgaaaaatggggaatcagaatgaactgggagcgggagaagatggcccggcagtttggttttacacatcgagggcgagcttgcttgcaagctggttttttatttgtgattattacaaatgcagcgccgatgacaacttggctcttgctttgcattatacaagattctgggcggttagcccgctttcagcaagaagctcagactattctacttcctcctggcctagctgcggacccaaatgatctccgttttgatatttctaagctgaaggctaatatatacatccaaggaatatggaaagaagcgttgagactaggctcagccactgcggcagccagagttgtcgttgatgacgcggagatcgaagggtactttatcagaaagggaagtgttgttctccttcccgttgcattgatgcattttgatcctatcatatttccatcgccctcagcgttcaaacctgagcgatggcacaccagcctcccggaaagtgcaccagaggacgagaagcagctagccgcagatagggcgaggaagcagaactcgagtttcaggacctttggtggcggaactggcttgtgctctgggagattcgtggcagagcaggaggttctgactgcagtgtgtaccctgttgctgctctttgatattcagtttgagaagggccatgaaaacttcaagttgaatcaccggactctaggtatcatgagtccaaagacgctcttctgcggagtaggtaacacccagtttctcaatggaattgggtccgcactgttgaatctccccaacctgcaatttttggggttaatcacgaataatgcttcagatgacggattgactaggcaatcgcctggtcaatatttatattttccgaagcaagacgagaatgactcccccaaagggacaaattttaataatatcacgtggactctcaccactaattctttcaacccaaatcattatcaaactgctccatatgtgtccaatggatactttgggcaaacccttccctcagagggtgtgggttattggatcgagagaaacttctcagcgctagaaggtagttgggaacttaatggctggcctttggatcaaccacgtgcaacatttggcaccattgccgggttttggaatcttcaagaaaaagtcacctatcctagtctcccagaaaacagtttgagaggaggagagtctgtcatcagtggtattcccgattggacaggcctggtcatcacgacccaggagggacacagttacaaacctggcgtcgacaaatccacggtcttgacgtatagccagagtacgtctctgcaaaatggaataatccacacgaatgtgacgtggaagcccgatggcgaggaaaccatctttcagctgaattttacagttattgcacatcggacgcgtgttaatctaggtctcgttcgcctcgacctagcagttagcaaagccgcaaagttcatcataaccgatataattgatggggctggggcaaccagggcccattttggagacaaagagatcagggccactgatgatctgatgtggacgagtgtgaagccgtggggtatagagaataccacagcttatcttgcttcaacagtcagttttgggggtttaagcgaagatgctctcagcaaactctccgagacccggcaggacgggtcggaccacccatgggtttcgcgaaatttgagcaccattgcgcaaagctgggaatgctccgcgtctagccagcagagacttagtgtctttaaatatgttggaatatcctctagtgatgcatttcccaaaaacacgcagtcaacagcatttaatgcggccttgcaagcgaaaaaaagcccttgggggcagctcgtgaaggaacataccgatgcttgggatgctacttgggaggatgctgatgtgcaaattccaggagacgaagagctccaaatcatgacccgaggatctctatttcatctcatggctaattctcggcctgggacagagccacacggtctcggggacaattccattatggtcagtggcctgtccagtgactcttacgctgggttggttttctgggactcggatgtgtggatgtatccggcactcctttctctattcccagatcacgccatgtcaattaacaactatagaacgcgacttcttggacaggcgattgaaaacgcgcagtcatataactactctggtgcgacatttccttggacaagtggaaggtttggtaattgcacagctactggattatgtgttaattatcaaattcacttggatacagatatcgcgctggctcattggcactattaccttcataccaaagacagggaatggcttagagaaaagggatggcctatcattggaaatgttgcagatatgtttgcaaactatgtcgtgtggaatacccggaacaaaaagtatgagacaaagcttctaggggagcctgatgaattcgcatacaacatagataacggcgcctatacaaatgccgggatcaaaatgctcttaggagaatgggctccttctgcagcgagagttctcggcatctcaacgcccagtaactggtccgaaatagccgaaaacatggaaattcctttcaatgagaaagagcagatgatcatcgggtttgatggaatggacggaacatggacggtcaaacaggcaagtgtaacattgattacttacccactgggatggaatatgaacgaaagacaggcgcaaaacgatatgacatactattcagcgaaaaactcgcccgacggtccagcaatgacctggtcgatgttcgccatcaacgaagcacaactccaagagcaaggctgtgcggcatatacctaccttcaacggggattgtatccatatatccgggcaccattcttccagttaagcgaacaagtttccgatgattggcatacaaatcagggaacacatcccgcatttccctttctcacaggatatggtggatacctacaagtacttactcatggcttcactgggttccgtgcccaggaagatgcattctttatggatccaatgatggtgccgcagatacccgaaggtatcaaaattaacggactaaaataccaagggagcgtgtttgacgtagagatcggattagaaaactcgaccattacaagaaaacgcggctctggtgcgtccgggtcgagaactatgagcccagtcatcgtgcggataggaggtaaggcgtacaagcgaggcgactatcttttagccgttggagagtctctgacccttcagactcgtcgaccggacttaaacgggaccgtcattgccggaaaccttgctcaatgtcgaccgatatcatccgaacacaagtgggtgccaggaagtataccccaggccgctgtcgatggttcaaacgccactacctggcagccgttgactccccaactcgcttctcttaccattgatttaggcagtatctaccgtgtcagcggagtatcaattaactggggccctacacctcctacggcctttactatttcagggcgtaacaattcagaaagcgagtttgcagatatttttatgactgaggacattgcaatctcggaaccatatctaggaccggaagaagcgaagattgtcaggatcagaccaggaaatagtacgatgtatctgtttggagaaattcatcaggcaagatttgttagattgagtattgaagggactcaaggcgatgataagagtaccggtgcgactgtggctgaagtagcgatactataa

SEQ ID NO: 339 - DNA, 7917 bp, Pseudogymnoascus pannorum
atggcttcagtgccaaatggtaacggccacccggccagcatatccgacaaacaggaaccgatggccataatcggaatggcaacccgtttccctcaagaagctaccaacacagagaaattatgggggtttttgttgaaagggaggtcagctcatactgcgtttccaaaagacagaatcaatccggatggacactatcaccccgaccccgagcatggaggcacatttgccgtcaaggggggccattttctttcagaagaccccgcatattttgatgccccgttctttggcatcacaaagacggaggtcctctctctggatcctcaacagagagtgataatggagaatgtataccaagcgcttgagaatgctggtcttccaattgccaaagtgaccggaaccaacacgtcagtctacgtttcgggattcaaccacgatcaccttgcaacactcaattccgatcctgaaacgaccctgaagtacaagcccacgggcacgacgaattctcttttgagcaaccgcgtttcgtggtttttcgacttcaaggcaccaagtttaaccttagatacagcatgttccagcagtatggtagctctgcacttggcttgccaaagtttaagatgcggagctgatgctgagtttagtccgtgcatggggcatcacggattcctctcgcaggaaggacgctgcttcagctttgatcatcgtgcggacggctatgcccgcggcgaaggggtaggtactgttatagtgaaacggctctcggatgcgctcagggacggaaacactattcgagcggtaatacgagggactggtgtcaaccaagacggacgaacagccgggatttctcttcccagcagtgctgctcaggaaagactcatgagaaccgtctatgcaagtgcaggactggattttaatgacactatgatggtggaggcacatgggacgggcacagccgccggtgatcctattgaagctagtgctattgctcggacattcgcgtcaaggagcaaagatattccactgtttgttggagccatcaaatctggaattggacatttggaaggcggtgcgggcattgctggaataataaagagcgtcctggtcctagagagtgggataatccccccgaatgtgaatttcgagaaggccaaccctaaaatcccaatcgaagcttggaatcttcaatttcctttagtaaacacgccgtggccgactcctggcctgagacggatatctgtaaattcgttcggagtcggcggcacaaatggacacaccgtgctcgatgacgcatataactatcttacttcccgaaatctaacgggtgctcataataccaaccatcatactccaacggccgaagaaataagagttaccgtggcggagattgatggctctatagccctagaaaccgaaatggacgccccaccgaacggccacgccaatggaacgtctaacggggcaactaccaacggcaatcatgataccacagaaataactaacggtaatggtgttcaaaacggcaacggagtcaataataatggccactttgcccctcatgtccctcgcctcttcgtcttctcttctttcgatgagaaaggggccaagcgaaacgcaaccacatacgccaagtacctgaagaatatccagccccccaatgaagatgactacatgaaagatctggcctacaccttgtctgaaaaacgctcggtattcccatggagaagctatgcagtgtctaactccttgtcggaactgattgagaacctgtcaagtgaccagggaatgccaagcgctgtgcgggtagggacaccacctaggattggctttgttttcaccggacaaggcgcgcaatggtacgctatgggtagagagctgttgatatataccatttttaggaagagcctcgaggacgctgaatcatatatgaagtcaatcggcgcggaatggtcgctgctagaagagctttcccggagcaaagaggagacaagattaaatgagccgcatctggcacatccgtcgtgcacagccgtacagattgctctcgttgaactacttaccagttggaacatccgacctacgcgagtggtcggccactcctctggagagattgccgccgcctactgtgcaggtaagcttagtaaggaagccgcatggaaggttgcatatttccgcggctatgtctcagcgaagcaacgtggagcaaaaggggctatgattgccgttgcgctgtccgaaactgatcttcagccgtatttgaaaaccatcaacgagctgcatgagggggagatgataatagcttgttacaatgctcccaagaatcacaccatctccggggatgaacacaagatcgatgccctcaaaactctcttggatgataaaaaggtctttgctagaaagcttaatgtgctcaacgcttaccactccgggcatatgaaggcccttgcagacgagtacctagaacgcatgagcgatatctcttttggcgatcgcctgtctgtggcagatattcacttgttctctagtgtcaatggccacaaagtcgagaaagacactctggatgcgcaatactgggtcgacaatatggtgtctcctgtccgatttaccgatgcgctgttggcaatgagctttactcggctatcgaagggacaggcgtcgttgcgtttgaatgccggcactgagaacatcttcgttgatgctattgtcgagatcggacctcatgctgcattgcagagcgctatcaaagatacactggcaaccaaagtcagcagctcctcgttctcatacttgtcagtccttaacagaacgactcctggcgctcagattatactcaatagtgccggagttttgtgctctcgcggttcgcccgtaaatatccaggcggtgaatgattcagccaacccaggcgccaccgctccacggttgatcgtccaactcccaccctacagcttcaatcactctgataaagtctggtatgagagcagactaagcaagaactaccgcctccgcaaatatccgcggcatgacctcttcggggctcccgtctctgactggaacagtgagagaccccactggcgccatattatcagactctacgaacagccgtggctcagagatcatatggttactgatgcctatgtttatcctggagtcgggtatattattgctgttatcgaagcctctaggcagatagcagatccggagatgacaatcacggaattccgcctccgtgacgtctctctgaaacgagctctcattgtccctgacaacaaggaaggtattgagattaacctttcgtttgctagaatggacgaatccagcttgtggggttcgtctgtgtggaagaaattcgtgatctctagctggaatcccactggaaacgattggatagagcattgtactggttatgtcagcgttgattatgagacttctcccaatcttgtcgatgctggacgggaatcagtggccgaggccctcaagtggaaagatacactggagggtgtcaaacaacgatgcgttatacctttcgatattgacaccacctacgacaacctcattactagtggattggcctttggccctctcttcaaaaacctatctgacgtacgaggaacggccgatgcacgtggagaagtttttggcttggtcactgtgccagatattgccgcagcaatgccgaaaggcttcactcaccctcacctcatccatccagcgacaatggacagcatgatgcacttcttcatcgcctcagtcatggaccacacaggtaagaacaccctacggacggcaatggtccctacgttcataaaagacgtgtggatctctgcccaggtggacaataacccttctcataccttccgtggacacggaaagtctactttcctcgcatatgacaaataccagagcgatgtcatggtatgggatggcgccacagacgaggctcgtatctcaatcaaaggaattcgcgccgctcctctcgaatcgattgatagcggatcaggcgagtcccgaaaactctgtcataatatcgaatgggggctcgatgccgatctcctcagccccgcatcattccccgccgttgtccacgccactcatgaagataatcttgattacaagtactggatcaacaggttccagcttgcaaccttgttgcgggtcactgacgctctctctgctctgggagacttcaataccgatgtactagaaggccatttcctaaagtactggaactggttgaagcaactagaagagtggctgcacgctgatcagatcagcggtatgaaattgagcgactggacagagtacaacaatgacccgtcgctcaaggcacagttatttgaagaagtcgctgcccacaatgcggatggtgcgctcgccatgcgaatgggatctaacattacggcagttcttcgcaaagaagtcgacccgttgcatctcatgtttggtcaagacgatcttcttaaccacgtgtatgagcaagtcgtcaagttaggcgatctgccaaatcttcaaaaggcatatctcgagatcgtagcgtataactccactaaccttcgtattttggaagtcggtgctgggactggaagctcaacagctgcaatgcttgacgggctctcgcagagtactgacggcgggaagaatatgacttcaagaatcgaaacgtatacctttacagatgtctcgtctggattctttgagaaagctcaggagaaattcaaggcatacaaaaatattctagagtacagaatattaaacgtcgagaaagatgtctctagtcaaggattcgatgttaaaagttacgacttcatcgtggctggaaatgtcattcatgctactgccgacatcaagaaatctctcacgaatttgcaagagcttttgaagcccggcgggaaactgattctgcatgagggcattagacaagattatctatggtcgggcatctcttttggccagttgccgggctggtggctaggtgttgaacctatccgtcagtggaacccttggattacggcggttcagtggaatgtaatcctgaaggaagcgggtttttcaggggttgatcttgacctgccagatcgaaaggacccgaaccttcatacgcaaagtctcttgatcgcaacagccgttgagccctctggtgcaatgccccagaccgtcatcgtgacaaccaccccttcttgcgattccgaactgatcacagctctaaaatcgcatcttgagttcaccctcaaaataccaaatgtctgcaccgtgcactacctcgatcttggtaacaccgacctcagcaaagcagtctgcatctccgtcatggaactcgagcgctccgtcctctcaaccctcgctatgacagagtataacaacatccgccacctccttgtcacatgtgtcggcatggtttggattactggcgacacactcaccaacccatccttcaacatgatcaccggactgacgcgcactgtgcgctgggaacgcgacattgacgaggtaaatctcatcactctctcagtgtgcgaacctaggcccgctgttagtgaccttgtatcatccattgggagactatacagccagcaatttatcgcaacgttaccggctgacaagatcaacagcgagtacatgctgcgccacgcatcattcttatcagcgcggctcatggactcagacactggtaatgattatctgtcttcaaaaactgtgcggcccacacccgtgctccaagagcttagcaaagccggaagaccgctgaagctggctactgcatcgcctggacagctagacaagctggagtgggtgacagattctatttatgctgagccgcttagtgagacacaggtggagattgagatcaaggctgtggggttgaattttagggatttgatgattgcgatgggtgagcatatggcgtatagtcttggaaacgaagcagcgggtatcatttcccgcgtcggcttgggcgttacagcctttaagccgggtgaccgtgtcgtttacatgtgtggcctagagagcacaggttgcttccagacatatggccgcgtcgatcagaacgtggtggttctaatcccagacagtctcagctacgagattgcgtgcagtttgccttgcgtatactccactgtcatttatgggttaatggatgcggcaagattgctaaagggagaaaaaatactgatccatgcggctgctggaggtgtcgggcaggcggctattaacctctcgaaaatgattggagcggagatcttcgcaacggtgtcgacgccggaaaaaagagcgctccttgtgaaagagtatggcattaatgaagagcacatcttctcgagccgagatctcacgtttgtccaaggcataatgcgagtcaccaatggcaagggcgtagacgtagttttgaactcgctttctggagaggctcttcgtcgctcttgggatcttattgctccctttggccgcttcgtcgagattggtaagaaagacgcccaagctaatggcaagattgaactccacccgttcttgcgtaatgtcaccatgacaagtgtcgaactacccacaatgatgcgccatcgacctcatcttattcaacgactgacggccgacaccatcaaactatatgacgaaggtaagattaaggaggctataccaacgaatgttatgggttatgatagaattgaggaaggattgaggatgttgcagtcgggtaagggcatggggaagatggtattccgaccgtcgcctagtgatatcgtgcccattgtccccgaacaaacgactccttaccgagttgaagcggatgcaacttacgtgcttgctggtggactcggtggcatcggtcgtagtatggcgaagtggttggtagagcgtggagcgaagagtctggtgtttctttcgcggtctgggagggtcacagatgctgtgggcaagatgatgttggatttgaagacggcgggatgcaatgttaaagtcttcacttgtgatgtgactgacaagatgaggcttgcggaggtgatggatgagtgcaaggttaccctgccaccgatcaagggttgcattcaagggtccatggttttgaaggacgttatgtttgagaatatgtcgtacgatacattcgaggcagctgtgaagcccaaagtccaaggctcctggaaccttcacgagctcctacctgcaaacatagatttctttgtcctcctctcctcggctactggaattctaggaaaccgcagccaagccaactacgccgccggcaacacctaccaagatgccctagcaaggcaccgcatctccaaaggtcttcctgcagctgtcatcgatcttggtaccgtcatgtccgtcgggtatgttgctgaaaataaagaaagggccagtatggccaagcatctcggaacggtgctcgaagtactccgcgaagacgagatacatactctcatcgagtacctcatggatccgcgctcgaaactgtccgagttatcatgccaactcgtctctggcttgactaccgcagccatctaccgcgaacgtggaatcccaacaccgacgtatctgagctaccccctcttcacccatctccgtacggcatcaagttcgcgaagtgaaggctctgaagaagacccctcctttttggtacaggcccagctgcgtgccgcgacgtctctcgaggaggctactgcagtcgctgccaatggcgtgcgggcgaagctgtcgtctctacttgccgttccacaggacaatatcgacccgacaaagtccatcagctccaacggtgtggacagtttggtcgctatggagttccggacctatctaacgaaggatttgggcgccgatgtgccgttgttggatatcatgggcactagcagtattatggtgctaagtcagaagattgcgagtgtgagtaagttggtgttgatttcggatgagaaggagacttga

SEQ ID NO: 340 - DNA, 2013 bp, Pseudogymnoascus pannorum
atgcttctcctcgaatataagcatggatctgaggcgaccagcacgctcaccacttccaccaatgttgacacctttctacttagcctccttgacgaccgcatcatgccttgggctgtcaaaggcaaggaatgccccgcagctcttaccacgaaggttgaggatctcgccagggtatcgggcactgaccctttcaatgccgctacagaggcacttgccgaccttggcgaatttcccggtagcactaacaccagtctggacctcgttaacgatgagaatgacgttgtgcttgagagtaatgattggctcaactgtcacagctgcgacagggttgttgtaggaggtgatgctatgctcagcgtcttcaaggcagcgcgtctcctcggcagaattcccagcctcgtactcgtggagggggtgctggggcttagggaatggtgtgaatggccagtcaaaagccggaatatcgagcttgtggatagcattgctacgggtagcagaaagagtggatcgattctgctgcaaagctcccaaagctcccaaagctgccgaagctgccgagctcccggcgacgacatagctctcctacccctcaaaaaagacaagaaaaacatcaccaatgctttagtaggaaggcggggtatgattgccgcctgcgcagatcctttcgcctttggtgtcgcgcatttaggcaaatcgcagagagggggaagcactaagagaacaccgcgaataaatagtatggggttgaagcctagtgaaagtaagactgccatgattctatgttcgacgcagaaagggaagatattaagcactgtcagtgctgaggataataccatcgtcagcaaatttctcatatataacaggtggctcggcgtcgctttgtttgccggagtggcatataccacgccttctcatccacatcatcctgagttcttcaacaaccgcgctatcttcaccccaccacaaggaaccaaagcttcctacccccgtattgtcgagttgtccgatggaacaatactagcaactatagcttggaggaatcccgatggagacctcccttatttccccatattccagtccaaggacaacggctggacatggaagcacatcagcaacttaactgacgatgttaacgggcttggttttggctctcagccagctcttgccgagcttccttacaagatgggcaaatttcccaaaggcacagttcttgccagcggcaacagtgccggtaacacgtcgacaaacattgacctgtatgcaagccataacaagggcaagaagtgggagttcgtcagcaatgtggcacgcggtggccgaccaaacaccactaatggagccactcccatatgggagccgttcatcttgccatatgaacacaccatgggactcttctactctgatcagcgcgatccacttcatggccaaaagctagctcatcaggagtcaaaggatctcatggactggggcccagtgattaatgatgttgcatacctaaattataccgatcgaccaggcatgacatctattgcccacataccaaccgtagataagtggatcttcacttacgaattcccggaacacgctggcggcatcaactggtttggcaaccaataccccatctactataagattgccaataacccccttgacttccgctatgccgacggcttccccctcattgccagcgacagtaccggcaatggctccccatacgtcgtctggagctccgttggcggcggcaacgggaccctcatagtctctgacgcagatacgcaggacgtctggaccaaccaggaggtcggtcgtccagacaagtgggtgaagcgtcctcagccgggcaagtcggcgtacagtcgcactttacacatttctcgcaaaaacccagaccgtctttacattttcagcggcgcaacgtttgacgatgttgctagtgggccacagatcccgtacgttgttactgcattgagcgtgaagaagctgctcgctggtggatacactaatagcggttga

SEQ ID NO: 341 - DNA, 861 bp, Pseudogymnoascus pannorum
atggggtttgcatgggttcctgggaagctagtggcactagggtatttattattgaggggtagcacccgacttgtcgcggccttgggtgttttacgtaggtgccggaaggctgtcaaaccttgtctagatttcggaagtatagacgcttttgagaaactattcagtgccaaaagttttcatcatgtccaaacaatatctcgaaagctcttcagcctctcctacgaagagaagatggtagcaaaacatccgcccaagtcaaacccgaacaggggttacagctatgtcggtcaagagaacactgtcatccttagaggatacaaaagtggacttggtcctggcaagactcgggatgtcaagaggaatcattcgacatgggagccgacaacgatgaactcgtctctaatccatggaatgaggaccttcaaaaccgagctcaatatcttgtcggcacttgccagggctctaggaattcccgatgttcacctcacgtctcttcattcacgggcagagaatgagttcagattacttcactatccaaccgtacccctcgcagagttcaagaatgggactgcaactcgcattgcggagcataccgatttcgtacaatcactacggtattccagggttccacaggcggactgcgcctgtcaccgcgtcacctttccaccaaccatcaagggtgacaacgatgatgagatgcttcctgaaaggtactccgttgcatactttgctaaggcgacctacaatgactctctactcccattaaaggggattattactgaggcaactccatgccgttacaaggaggacataacagcctgggaatggaacaacctccgtattggaaacctgtaccgataa

SEQ ID NO: 342 - DNA, 4137 bp, Scedosporium apiospermum
atggatcgctttcgcagctataccgagccatgggaccccatccgatatggcatctgggccatctatgcccaatcaaaagaggcctttttcagtggcagataccccgatctttttaacctcaaatatctcctagactcggggttttatttgtggtttaaagttctgaatgagcatttttgccgctttgagcaaaatcaaaccactatcccagttcttgtcccagcttctactggtgtggtacttgagctcggtcccggaatgggtaaccaactgcaccgcttcgacaggacaaaggtgactcgtgtcgtgggcgtggagagcaactcgcacttcacacgagatattgagacacaggtcaagaaaaacggtcttgaagacatttacgagctcgttacatgccgtgtggaagatagcgacgtgctagaaacgcatggtgttgttgccgagagtgtggatactgtcctgagcatccaggttctgtgctcggtggacaacccggaagccgttatcaaggagctttaccggctgcttaagcctggtgggaagttcatattctgggagcatcaccgtaactcggaccgtactactgccgcaatccaatttcatcgcctcccgatagacgtggtcgggcgctctaagatggacgacctcttacagctggagcagtttgctctggcttccaaagtacaagccgaaattaacaaccacacaggcgtctccgacaagacccttgccgaattcatcatcgcccagcggctcgaatgcgaagaccttgccgctttcaagcagaggctaaaatctatcggcgccgatttccctacgagtttggtcgagagtatagaccggctgtgcaggtcactacacccgaagctcaagaagaagcaaggcgccgcgaacaagatcgaagaggaagagcatccgacgcgaagtaatgaggagaaggcaaaaatattttcagggttggcgcttcctgacaaggaagtcccgcctgagtcgaatggcgatgcgatagatgataccctggcgcagttggagagtttaggagggaggccgcgcaagccgaaagagtcgcgaaaacgttcacggtcccccgaagacggcgacagagattcgaggagacgaaaccatagagaacgagatcggtcacgcgacagatcgcgagaccgagattcgcggaggaagagatatagatcaaggtcgagatcaccaccgaggtaccaaggagaactggaccccgcgccgattatcgacaagatctatgacggaaaggtcacgggcgtcaaggattttggcgcatttgtgtccctagaaggtatcaaggggcgatgtactggcctaatacatatatcgaggctggccgaaggccgacgcattggccacccttctgaggtagtatctatgggtgagcccgtcaaggtcaaagtcgtcagcatcgaaggaaacaggataggcctgtcgctcaaggatgtcgaccaacacaccggtgaggatctcgcggccccggctcccgcctttggatccggtgccaacatggaggccttgggaagccgacatggcttcgtcgaccagcccacatcattccgcaatccacagccgccgaggcacaagaagcaattgacagattcggacagatgggagatacgacagctcatccgctccggagtagcgaaggcatcggactttcccgaacttgaggaggagacgaaagcagtccataaggaagacggtggcatggagctggaggaggatgtcgatattgaagttcgagaggaggaacccccattcttggttggccaaacaaagcagtctctggaactttccccgatccgcgttgtcaaggctcctgatggttcgatgaaccgagcggccgtaacgggatcggcgctcgtgagggacaggaaggaagctcgccagcaagaggcagatgcggaagcgcatgcagcgcccaaggatgacttatccgcgcagtggcatgaccctatggcagacccggataagcgaacatttgcgagcgagctccgaaaggcccggataaacgcaaagtcggatgttgtgccggagtggaagaagaccgtccagaatagggaccagtctttcggaaagcgaaccaaccttagcatcaaggaacagcgagagggcctccccatattcgcctttaggtcacagctcatcagtgcggtgaaggagaaccagattcttatcgttgttggtgagacgggatccggcaaaaccacgcagctcacccagtatcttgctgaagcaggctttgcaaatagtggcatgattgggtgtacacagccgcgtcgtgtcgcggccatgtctgtcgccaagcgtgtctccgaggaagttggctgtaagcttggcgaggaggtcggatacacggttcgtttcgacgacactaccactccttcgaccaggatcaagtacatgacggatggtatgttacaaagagagatcctcatggatggcgatctgaagcgctactccgtcatcatgttggacgaggcccacgagcgaaccatcgccacagatgttcttttcgcccttttgaagaagacggtcaagcgtcggccggacctcaagattatcgtcacctctgcgaccctcgacgcagataaattctcgagctattttaacgaatgccctatctttacgattcctggacgaacgtaccccgtggaaatcttatattcgagagagcccgagagcgactacctcgaggctgcccttcttactgttatgcagattcacttgacagaacccaaaggagatattcttctcttcttaacgggccaggaggagattgacacctcatgcgaaattttatatgaacgtatgaaagctctgggtcctgatgtgccagaactccttattctccccgtttattcggccctgccgagcgaaatgcagagtcgaatcttcgaaccagcgccgccgggaaccagaaaagtcgtcattgcgacaaatatcgccgagacctccattaccattgacgacatctactttgtcgtagatccaggcttcgtcaaacaaaacgcgtatgatccaaagctcggtatggactcgcttgttgtcacaccaatttcacaggcccaggcaaaccagcgagcaggtcgagccggccgaactgggcccggaaaatgcttcaggttatacaccgaggcagcgtaccaaaccgagatgctgccgacgacgatcccagaaatccagcggcagaacttgtcgttaactattctcatgctcaaagccatgggcatcaacgatcttatcaactttgacttcatggacccgcctcccgttaacactatgcttacagccctcgaggagctgtatgcgctcagcgctctcgacgacgagggcctgcttacccgcctcggacgcaagatggccgactttcctatggagccgtcactcgccaaagtcctaatcgcctcggtcgatctgggctgctccgacgaaatgctcagcatagtagcgatgctcggcatgaacgtcttctaccggcccaaggagaagcagacccaggccgaccagaagaaggccaagttccacgatccgcacggcgaccacctgaccctgctcaacgtctacaacagctggaagcgcagcgggtatcagaacgcctggtgcttcgagaactacatccagcaccggtccatgaagcgctccaaggacgtgcgcgaccagctcgtcaaaatcatggagcgctaccgccatcccatcgtctcgtgcggccgcgacacacacaaggtgcggcaggctctctgctccggcttcttccgccactcggcgcgtaaggacccccaggaaggctacaagaccctcatcgagggcacccccgtgtacctgcatcccagctcggcgctgttcggcaagcaggccgagtgggtcatctaccatgagctcgtgctgacaacgaaggagtacatgcattggacgacggtcatcgagcccaagtggttggtggaggcggcgccgacgtttttcaaggttgcgccgacggataggctgtcaaagaggaagcaggctgagaggatccagccgttgtttaataggtttgagggaccggatgattggaggcttagtgcgcagaggagggttggaaggtctggtggtggtggaggtacttggggttag

SEQ ID NO: 343 - DNA, 1248 bp, Scedosporium apiospermum
atgggctccatgccgaataactcagaaccaatatcagcgatccttgatgccatcggtcatgtcacgtcctctctggccgcctacgagcgggtaacgaggaagtacggtggtagtgaagaagttgcccataagggcgagattgcagttgcacgcaatgccatgaccaaggatgctatccagcttctccaagaaattcgtgggcccattgataccgtttatggattcttcgaaatgggatcccaagcatcggctattcgctgcctcattgcaatgggagcgtttgacaagattcccactgaaggcagcatcactgtagccaagctggcatccgagctcggtgttgaccagaacctgctcacccgtttgatgagagttgtgagcgtcaccggacccttccaacaagtgcgagaggatgagtatgcccatactgctttctccaaggcttatctgatcccagaagtccgaggaatgtatactctgatattcgacgaaatgtaccccccgtgggtcaaaatgcacgagtttctcgcctctcgcggttggaagagtgatggggaggagagagataatgcatacacgtatgcgcatcaaaccggcggcaagagcttctgggagcatctgaagcagtatccaaagcgtgtggaggctctcaacctcggtatgggagcacagactgctacaaccatgtggtccgtggacattgtcgacttcagggccctgctggcatccaagaagacaaacaaggatgacgtgttggtagtcgacgttggaggtgggaagggacactgccttcagaggatcaacaaggctatctcggacatcgagggccgcctggtcctgcaagatcgtccagaggtgattagcgatacgtacgacttggattcttcgcggatcgagaagtacgagtacaacttctttgaacctcagccaatccagggcgcgcatatatactacatccgtcgcgtcttgcatgactggccgaatcatctttgcgtcgacatcctgaagaacattgccaatgcgatggagcgcggaaagtcgcgtttggtcatcgcagaaatcgttgttcccccaactggaggggattcggaaactgggtggatggatctagttctaatgactgtcactggtgtcgagcgcagcgcaaaagactggcaagaattactcagtgccgcaggtctcaagctggagaagatctatacttcccctggcactaaccacggtgctgtccaagccgtccttgcatga

SEQ ID NO: 344 - DNA, 915 bp, Scedosporium apiospermum
atgagtggggagcgtaaagatgttgagttcaaaactctggatggcttgaccctgcgcggctggttgtttcagggacccaagggcggtcctgcagtagttgtcaatggtgcatttaacagcccaaaagagatctttgtagccagcgtcgccgaatggttcgggaagaacggcgtgacggctctcgtttacgacgcccgcacgctgggccagagcgatggcctgcctcgaaacgacctcgacccgcaaaagatggcggaggacaaccacgacgctgtcactttcctgcaagatgggggatgggtcgacccagaccgtatcgccatctggggcttcttctatagctccggcattgcgctcgaggctgctgcttttgacaagcgcgtcaaggcggtcatcgcacaaggtctgatgccggactggtgcctcaacccgccggacgaggctgccatagttgcgagtgcggtcgcagatcgggctagccagcttcgtggcaacccgcctcagtacatcccccttctcaacgacaagggcgagcacctgatgcacttcaagtatctggccgagatgacccccgagcagaagcaccatctccccgcctgggtccacggggccaagaaaaacgccccgagcttcaacgaccacatgacgatccagagcttctaccgccatgctaagtggaagccaatgaatctcttcgcggccgtcaacccaaccccggtcatgattctgacgcctgaggacgacgagatcgtgccgcccgcattccaacggcgcatttttgatagcctgcagtcgccacagaagaggtatgagattgtaaagggcagaggtcacatgaactttttgaaggatgtaaactttgatgagctcttgggcggccagctagcgttcctcaaggaggtgatgaagttctga

SEQ ID NO: 345 - DNA, 960 bp, Scedosporium apiospermum
atggctgccgctcctgctgcggccgcagctaccatcccagctcccaagagcaggccggagggcatcgatctctatgctcgcttcgctctcgctggtgctctgggctgctctgtcactcacagcgccgtcaccccgatcgacgtggtcaagacgaggatccagcttgaccccgtcacctacaacagtggcatgattggtagttttcgccaggtcatccgcaatgaaggcgttggggccctcgcgacgggcgtagggccgacttttgcgggctacttcttgcaaggcgccttcaaattcggcggctacgaattcttccagcagaagctcactgataccttcgatgcggaaaccgtcaagcagaatcgcaccgccgtttacgttgtttcctctggcagcgctgagttcttcgcctccatcgtcctgtgtcccctggaagcgacgcgtattcgccttgtttcgacacccgactttgccaatggtctggtcggtggtttcagcaagattctgaagaacgagggcattgccgccttttattctggtttcggtcccatcctcttcaagcaaacaaaaaaaaaaactaaccccgcgtacatggttccttacacaataaccaagtttgtcgttttcgaaaaggtttccgaggccatcctgagccagtttgacaagtcgcaaaggtcggccggtgcatcgaccgctgtgaacttgggatctggtctgatgagcggttttgcggctgccattgtgtctcagcctgccgacaccatgctgtccaagatcaacaagacgaagggtctgcctggtgagagcaccgcctctcggttgatcaagattgctggcgagcttggtcttcgcggatctttcgctggtctcccgacgcgtctgttcatggtcggtggcctcactgcgggccaattcgccatctacggcgatatcaagaagttcctcggcgctacaaagtag

SEQ ID NO: 346 - DNA, 879 bp, Scedosporium apiospermum
atggcgttatcttcccgcgaagacatcgagtttaagaccctcagcggtgtcacattgcgtgggtggctgtaccctgccgataagcgcgggccgggaattattctttctgcaggattcaacatgcccaaagacgtagtcttaccagaaatcgccgagtggtatcgcaaacgtggctttacggcactcatcttcgacacatacggcatcggcgccagcgacggtgagcccagatgtgatacagacatgcataggcgggttgaggacttcatcgattccgtcacttggctttctcagaaccccctagtagacccggagaagattgtgctctggggtctctgctttgacggcaacatcatgctcgccacggcagcttcagaccgccgggtagccggcgtcgtggctgtggcgcccatgattgacgtgaccggcgaccccgagcgccgtgaggccgtcctcgagcttgccctagcagaccgagccggacagctcgctggcgaggagcccatgtacctgcctctggtcgacgaggacggcgtcatgcctctcggccaggtgtcgggcctcggcttcttctccgccatggaggacatgaacctgcccgtcgagaaccgcgtcaccgtccagagctacatgagggccctcggctggagcatcttgcatttactgcccaaaattagccccacgcccgtcatcatggtaacacctgagctggaccaggtgttccccgcggagaggcaaaaggccgcatttgacatgttgggagagcctaaggaacattgcgttattgctggaaggaatcactttgactggatgtttggggacatggatggcgttttcaacaagcagctcgactttttgcagaagtacttgaaggcttaa

SEQ ID NO: 347 - DNA, 1080 bp, Scedosporium apiospermum
atgaaggctcacacggcaatgaaggctcttgttggcggggagtctggtaattaccggctcgcggacgacatcgatatccctgcccccaagccaggcacgatgctgtgtcgtgtgcattccgtcgccttgagcccatacgacgcaaagattgtagactattccaacacacctggcgctgtgggcggctgtgacttttccggcgtcgtcgttgcggtgggcgaaggagtggtgcggttcaaggcaggtgatcgtgtcctcgctgtgacttttggactcagcgccttagacaagacggcgggtgcctttgctgagtatgctctggcaatcgaagacctgagttgccatgttccggacagcttgtccttgacgcaggcgtgctcaatgggtcttgggattgctactgctggcctggcactcttccaagcacctgggctacagctaagaatgccacgctccaaccacgccgatcaagagacgggtgcttttgttcttatctcagggggtgcaacgggcacggggaccatggcaacccagcttctgaagagtgctggttacatacccatcgttacctgttcgcccgctaacaattccctatgcgagtcctacggcgccgcggcttgcttcgattacaactcagccacgtgcggtgctgatatccgcgagtacacggccaacagtttgacctctgtctttgactgcgtcactgacgcaacgactatgaggatgtgctacgcggccattggctcttccggtggtcaatacgtcgctctagagcccatttctcctattatcaagtacacgcggagggatgtccgcgctgactggctgatggctcccaccgttctggggacccccgtggagcttccgggctcgtatggacgcccgagaactccagagcacagaagatttgcatcagagttgtttctgctggctgagaagctacttcaggagggcgaaattaggaatcatcctctagagattcgggacggaggcctggcgagcatccccagatatgtgaacgatttgcgggttgggaaagtgcgggcaaagagacaggttgtgccattactggcagggtag

SEQ ID NO: 348 - DNA, 8586 bp, Scedosporium apiospermum
atgggtagtaatgccaaccccaactggctcgcgaaggagcctatcgcgatagtgggaagctcgtgtcgttttccaggcggcgctagttccccctcaaagctttgggtgcttctcaaggatcctcgggatatcgtgcaagaaatcccacccagtcgatttgataccaaggcattttatcaccaagacagccaacaccatgggagtacaaacgcaaagtatgcctacctcctgcaggatgacccccgggctttcgaccgcgatttctttaacatcagcccaaaggaggccgaggcaatggacccccaacagcgatgcctcctcgagaccgtttacgaaggtattgaatcggccggctactccatcccccagcttcggggatcatccactggcgtctttgtgggagccatgagcttcgactaccagctcgttgccatgcgtggcctcgacagcctgccgcagtaccatgcaaccggcggttcgatggcaatcctggccaaccgtgtgtcgtacttctatgactggaaaggcgcatcggttgcctttgatacagcctgctcgtcatcgctcgttgccctacaccaggcggtccttgctctgcgaagcggagaagtagacatggcggttgcagcaggggcgaatctcatccttggacctgagccatttattgcttattcaaatctaaatatgctgtcccccaacgggcgatcatacatgtgggattcttctgccgatggatatacgcgcggcgagggattcgctgccattattctcaagactcttagccaagctgtggctgatggtgaccacatcgagtgtattatccgtgaaacgggtgtgaattccgatggccggacaccaggcatcacaatgccgaactctgaggcacaagctcgacttatccgagacacatacaccaagtgcgggctagacccgacgaacccaagagaccgtccacaatacttcgaagcacatggcaccggaacgccggtgggtgaccctatcgaggcgcgggcaatacacgacgctttcttcccggggcatccagaccagaatcatggccagctctatgttggatcgatcaaaaccgtcattggtcacacagagggcagtgcaggactggctggcgtgctcaaggcgtcgttggcggtccagcacggccagattccaggtaacctacatcttcgggagctgaaccccaaaattcgaccattcttcaaccacctccgcatcccgacagagttaaccccctggcccgcgcttccagagggccaaccgcgtcgtgcaagtgtgaatagtttcggctttggcgggaccaatgcgcacgctatcatcgaaagctgggatgggggctacgagcgctatcatgtgtcggaatcgcgtccggctggactcttcgtcctatctgctaactcggcccaggccctggcagcaaaggctgcagagttagccaactatctacgagatcatcccgacacagatcttggtaggctttctcgcaccctgttccagaggtcggaattcccgttccgggcctccttctcagccacgtcggccacccagcttgccgataagctcgaaacaggcacagaagcactcagcaagacgtcacgcatcgcaaccattcccaattcactaccgccccggatactcggtgtcttcactgggcaaggtgctcagtgggctactatgggttgggagctctaccaagcatccgccgtgttccgcacgtcgttggaccggcagcagcgaagcctcgatacgctccccgacggcgatcgcccggactggtccctgatcgacgagctctcggcaccaaaggagacctcccgcgtcggtatcgcagccatctcccagcctctctgcactgctctccaagtggcgctcgtagacgtcctccgcacggctggcgttgagttttctgccgttgttggacactcgtcgggtgagattggtgccgcctatgctgcgggatacctggatgcccgggatgctattcgtgtggcttattatcgagggtttcattctcatctggcacaggggcccggaggaaagcgtggcaagatgatggctgttggcatgagcttggatgaggcattggcattttgcaacgagtttagttcggcactcaaggtggctgctaacaactctccaacgagttgcacgctggcgggagacgccgatgctatcgatgaggccaaggcactgctggaccagagcaacacttttgcccgcgtgctggcggtcgacacagcatatcattctcaccacatgcggccatgcgcctcaccctatctcgaatcgctacgcagttgtgggatcagcgttctgaagggtcgcaaaaaatgcgtgtggtactcgagtgtttggggtgcaaatggccgcagtcgctccttcgacgaccatcatggtcttgagttgctcgggggacagtactgggtcgataatctgaccagtacggtgcagttctcccaggcagtaagcagagcagtgtctgaagaatcctacgtcttggatctcgcccttgaaattggaccgcacccggctctcaggggtccagcctccgaggtgatcaagtcgttgacgggtgtagctgttccgtattctggtgtccttaaacgcggagagggtgctgttgaggcctttgccgctggtttaggactcatctggtcgttgttcccgtcgatgcgccctatcatcacctttgacggcttacaccgagccttcccccaagccagcccaaagtatcctgtaattctcaaggacctgccgccttacccctgggatcatgatagcctcatctggcgtgagtccagagcatcttgcatcttccgcactcagagccagcctcgcgaactcctcggctttccggtcacactcggtgagcatggccggcgcgaggttcattggcgacaggtcttcaaactaagtgaactgcaatgggtgaagggccatgccatccagggcgaagttcttttcccggcaacggggtacctgaccatggcgtatgaggctgctgtgcgtctcgtcaatgaccatcaggcactgcgtcttgtcgagctgcatgacattgagatggtgcgtgccatgagcttgcaggaagattccccgggtcttgaggttctctttaccatacgtgttacgagccagtccgacagctgcattgccgccgaggtggcctgctacagcggcgatatcaacgtgacgaaactggacggccctttgacagggcttacagcccatttcagcggcagcgtgcggatttggcttggcctgcccctgaaaaacgccctgcctccccggacggagcctctgctgcccatgaacacgttggacctggagcagttctactggtatttgtccaaagtgggctacaactactcagatgctttcagagccagctcagtggaccgccgccttaaccaggccgtggtaaccgtcccggctccccctgagccgactacaattcggtcttctatgcaccccacggtcctcgacactgccatccaaggcctcttggccgggttttcatatccagaagacggtcgtctcaggacggtgtatctgccaaccgccattgactgcatccgtatcaacatggtggcaccacctgcgtctcccggcgtcctcatggcagatagctttctgaccttggcggatgcaaagtcacttgaaggcgacgtagatgttttcgactcaaaagatgccaccatccatgtccaactgcgcggagtccactggaccgccctgaaccaggaggaagatcgctggctctatgcagccgagacatgggtgcgagatgcggcttacgggattgagcccaggctcaagaccaaactctctccagagaatagtttgttacgcacgcttcttgtgcgaaccgcttacttctacctgcggagtcttcgagaccagatcaaaccctctgagcttttacttatgagcaaacatcggcggcacatgatgaagtgggtcagggagcatctatttccccagatcgaagccggcaagcaccccgatattcaagcagagtggtccaacgacactctcgaggacgtggagcaatggagcgccagctatttggcttcaggaaacaatgatatgcagctactacatgccgtgggtggtaagctgccagccatagctcgcggaactattcctcctctccaggtactgatgaaggacggtatgctcgaccgtttgtatgtggagggagtcgggtttgctgacggcaacctcgatctcgagtccttggttaagcagcttgcacatcggtaccctcgtatgaaggtgctcgaagtcggtgctgggacgggtggtactactcgagcggtgctttcggctttggacggcaaatacacatcatatacgtacacggatatctcggccggcttctttgagcctgcgaaagcaaagttcagccagcatctgagtcagctgtcgttcaagatgctcaacatcgaaaaggacccggtagagcaaggattcgaggagggctcgttcgatatggtcgttgcctcgaactgcctccacgcaacacggagcctgaaggataccgtccgccactgtcgccgcttacttcgacctggggggtacttggtgctgctggagatcacacgcgaccatcttccaatccagctcatcatgggtacgcttcctgggtggttcctgggcgccgatgagggacgagtctgggctcccacgatcggcctcgacgagtgggatgctttactgaaggtcaccgggttttcaggggtggacacaagctcgacgccttccttctgttcggtcatcttatcccaggcaaccgacgaaaccatccagatgctccgtcagcccctttccaccaattctcagtcgccaatgccgcctctcgaccaacaagtcctggtcgtcggcggttctgaactcgcatccaggtcgcaaacactcctcgcttctgccggggctgtcatcagacgtaaccttgagggcattgagattcccagcggtgccgttgtgctctgcctttgtgacctggacagcccggtctttaactccatgagccagtcgaggttcgaagccgtgcaggccgtcttccgaaacgccagtactgttctatgggtgagttcaggggcgacttctggcaagaatcccctggccaacgtgaccgtgggattgggacggactcttctggccgaacgtagtgacctgaggcttcagttcctcgacgtcgatgcgcccgcaacccttgaaccgtctttactagcaactcttctcctccgacttaccgggatgaattcagactacaattcggacgagatcctctggacccctgagccccagcttacactaagggacggtgctatatatatacccagggttctggctctggatgctatcaatcttcggtccacggcgaggcaccgacaagtcacccagctgaccagctttgagcttccagatatagtcatcgaggtcacgaagcgacacggagcactcgaactgctgtatcgccatcaccatgagcatgtccacaatgttaagccaggcgaggtgcgtgtgaaggtcacggcatcgtctctttactcccttgtctgctgcgaaggttcgtccaagatgtctgcatctgcatcttcgaggcctgctcatctgtgggtgggccacgacatggtatcaggggataaactcgtcggcctttcacacgcaagcagctccatcgtcacggttgctgaggattgcgtcttgtatcgccaacgcagtgccgccaacaccgccgccgaggagtcggtcgacgccgcgcaacagctccaccatttcacagctcaggcgctagtgaagcatctccttcgcgacttggagggccccgtctggattcacggcgccccaaatcatctcagcaaggcaatttcccgtgttgctgcagagcagtgtctcaccgtgttcgagacgacgtcggatatggagagagctggcgactggggtttcatccatccctacatcagcaagcgaaatcttcaatcactacgcatgcgcatgagagacgtgaaaacgttcatcgacttgaagccctggaagagcaacagtatttcggcgctgctgcgtgcctcgtctccacgttccaggctcgttaccatcgacatcgaagatctgaatgatctgattattggattgagccgcgaggacctatgcaggctggccagacagcactttgaagaccatgacaacatccggaggggcccggataacctagaccagatcctgcccatcgaaaacgtaacaacggaggtagtcaaggggttgggccctgcaacggtgattgactggtccgctaccgacaaagtcaccaccgtggtccatcctgtcgagcacaacgggctctttgccgctaacaagacatatcttctcttcggcatgacgggagatgtaggcatttcaattgctctatggatggtggatcacggagctcggagcgtcgtcctggccagccgtaagcccagtgtgccagccagtgtggttgagcatatgtcgcaaaagggggcagacctgcgtgtcatggccgttgacattacgaacagagatgctctgagaaccttttatgccgacatcaagtccagcatgccgccggtcggcggcgtcatcaatggtgcgatggtgcttcgggaccgtctctttgtcgacatgtcctggcccgactttgaggccgtgctggcgcccaaggttgtgggaactcagaatattgatgaactctttggcgacggtgaagaggatgagactctggacttcttcatcgtcctctcgtcggcgacttcgctggtcggcattatcggccaatccgcctacagtgctgcgaaccacttcgcggccagcctggtgcgccagcgtcgcagtcgtggcctggcgggttctgtcatcgtcattgggttcctgacggggctgggctacatcttccatcgttcagacaaggaacacctcgcgacgattgaaaagtcacttctgccacggctggatagacaatccgagacagatctgtgcgagatgctggccgaggccattgtgtgcggacgacccaactcagaccagccacccgagctaatcacaggtataaggacgtccttccaagaggcatggcaccaagacccgcggctttcgtgctatctcgtccaagaaggagttcgagagagcggcggtggaccagaggaggtcaacgggaacgttaaagtcgaggttcagctggcggcggtggaggatcccaaagacgggctgacagtcttggagaagtgcttttcccaggctttgggcaacatgctccagctcgacccagcgcaaatatcgggcgatgttcctgcagtcaaccttggagtcgactccctcgtctcggtccggattcgtgagtggttcctgaaggagctcggcgtcgacgtacccatcctgaaaattatgtccacgaaccacactgtatctcgactgtgtgaggacgctctgacaggctggcgaaggcttcaggcagggtccgatatggcggcggcaacatcctcttccggcacagctcgtcaggacccagagatggactggacaaaggaattgaccggacttattgacggaatccctgctcttatcccgcaaggagccgagtcggtcaaggatgcgcctcggagaagtgcacggcgcatcgttctcacagggtgcacaggcttcttgggtacgcacatgcttcgcaacctggtcgcagatgacaacgttgctgagctgcactgtctctgcattcgctcacgccgtgttcgcgtccgggaccccaggattcgagagtacaaaggcgacctgatgaagcccctgttggggctttctaacgacgacttcatccgcctcagccagactgccgacttgatcatccacttgggcgccgaggtcaaccatctcaagtcgtacgaggctgtacgcaccgccaatgttgtctcgacacaagttctcctcgccatggccacgccgcgcggtgtccccgtccatttcgtatcgtcatcatcggtcgccatgctgcagaaggggacccatgagctgcccgagatacccccgtcagccatctcccctccgaccgatgccgagtccctgatgaagaatgccataggctacgctgccagtaagtggatgggcgagatgctgctagaacacgccgcgccgcctgcggttgtgcaccgcttccccaacatcatggggcccgatgctcccgatgagatcccgctagttgcgctggaccgcttctgcacccggatgcgagccgtgccggcgttggatccgcagcagtgggtaggacaactggatatcatcgaggtcagtgatgtcgtgcccgagtttttggcaaacgcatatgggcacgatccccagaagggttttgccgtgcacaactattgcagcagtaacgagtactggctgtcggacctggcgggcatgtatgagaaaaagctcggcggccacattaaagtcttgccgacggccgagtggatgcggagagcgacggccatggggatgccgaagggagtagtggcgacgtttactggccatgacgaagtcttcgtatcgccagtattgcggaaggggtcaggttcgaggtaa

SEQ ID NO: 349 - DNA, 1689 bp, Scedosporium apiospermum
atgtctccatcaacggcttcccacgatctcaagtccaaaaaggacaagttggatgttgagtttaacgaacaatccacggcgacatcttcgactgtcgaggtagagaccgagaagaagcgagatactggtaccgatgaagaagttgccgttgcagaatctgtgccgcaggattccggcgactacccatcaggtctcaagctcacattcatcgtggttgcgcttgtactcagtgtctttctcttttctctggatcagaccatcgttgcaaccgccattccaaggattactgacgagttcaaaagcatcgacgacatctcgtggtatggttcgtccttcttcatgacacttgggggattccaatctatgtgggggaaagtgtacaaatatttcccccttaagatcagcttcctgatggccattttcatctttgaacttgggagcttgatctgcggtgtcgctccaaactctcccgccctgattgttgggcgtgctattgctggcgttggcgccgcgggcgtcgggtccggagcgtacacaattattgctttcgctgctgagcccaagaagagagccaccttaaccggggttattggcgcctcatatggcctcgccgctgttactgggccactcattggcggagcgtttacgaatacggtctcctggcggtggtgtttctatatcaatctcccgatcggtggtctcgccgcttccatcatcttactttccttcaaagctcctccggcggcgaaaccggctgaggctacgctccgggagaagtttctgcaaatggaccccctggggaccgcgctcattatgggcgccgtcatatccttcctcgttggtcttcattacgctggtttagggaagccgtggaattccagcaccgtcatcggcttactcgtcggctgtggtctcatggccattgcctttgggtttctcgagtccgtccaaggcgaacgcgcgatgttgacaccgcgtcttatgcgcatgagaaacgtctgggtcaacggcatatacggggccttcttcgctggttcgtacttcgttccgttgtactatctacccatttacttccagagcatcgacaacgcgacgcccattggctcaggtgtgcgcaatttgccgctcatcattgcctttacaattgccaccattggctcgggtggaagcatctcgaagacgggcattgcaacccccatactgccagtcggctctgctatcgccaccatcgcggccggtcttctctatactctcgacatcgggactggggcaggcaaatggattggctaccagattcttgccggctttggatacggcctgtcgttccaagtcccgatcatcgtgagccagggaactgctgaccctagcgacttggcttctgtgacagctattatcctattcttccaaaccatcggcggtgcagctctgattggggccgcgcaatccggcttcgtcaaccagctcttgaacaagcttcccagcaccgcgccgggcgtcaatcccgctctagtcgtggccgctggcgccactgagctgcgcgaggtattttcggcagacgatctggatggtatccttgttgcgtacatggcaggtatcaaggttgcttttgcaattactatcggggccgtgggcttctcgttcccaataagcttgcttagcaagtggaagagaatctcaacagcagcttag

SEQ ID NO: 350 - DNA, 1329 bp, Scedosporium apiospermum
atgggcatcgagctgaaacaacccgactctgcgcatctgccgcacacaaacggctcatctggcacactgcctgagagatcatcaccaactggaatcgctgttttgattgttggcggaggagtagccggcttactggccggtctcgagtgctggcgtcagggccacgagcggtggccagacatggccaaggagaacgaccgcatttcatacgagatgtggatttcatggcataaaatcaatggggacctgatttccggtccggctcctttccgtcccaatgctcaaaagaaagatggccctgaaggtccaaatactctgcaaaccgccaagatatatagacacagtcgtccgaccatgcacaagatgctcgccgatcaggttgagagagttggactcacggtggaatacggcaaacacgttactcaataccaagaggaccctgattcttccaaggcttatgtgattttggaaaataacgaaaagatcgaggcggacttggttgtcgcagctgacggaattggcagcaagtcttatagtatcactttgggccgtcaagtcccggcccgccccacagggttttcaatctatcgagcgttgctgcctatcgatcaggctcttgtagatcccgttatcgatgagaagttccctctgttagagaatgggatgtcctccacccaactctggatgggcattgagtcctggtctaacaaggttggacccgaggtcgtgcttcaaaccacggccacgattgacggttggcccgacttcgcggatcgattgatcaaggcaacagccaaggatcagatccacgacttcaaactcatgtggcgtgagcctcaaccttgctgggtttccccaggcggccgagttgtgcagatcggtgatgcggcgcacagttttcttccatcctccgggaacggtgccacgcagggtatggaagacgccgtctctctggcagcttgcttgcgacttgctgggaaagacaatgtgccctgggcaacccgtgttcataacaaactgaggtttgagcgggtatcctgtctgcaaatgctgggcgtcctcaaccatgagatgcgcaatcgctctgccaatgcggatgcttcacagacgaagcccatcggcatacttggcagctggatttggaaacacgatccagagcattatgcaatcgaaaactacgagaaggcgttaaggcacctgacgagtgggagtgaatttctcaatactaatgtccctcctggacatgtataccagccgtggaccattgatgaaatcctgaaggccaaggaaacaggcagggagattgtcttggatggggactgggattaa

SEQ ID NO: 351 - DNA, 1167 bp, Metarhizium anisopliae
atgttttcaagtctcttgttgctcaacctattgcctctggccatcgcggctccagccaagcgagctgagccggcaccactccttgtcccacgaggtgacactatccccgacaagtatattgtcaagtacaaagagacctttgatatgtcagctgccgacatcaccatcaaggaataccatgccaaggcggagaaaacgtactctcacgtcttcaacggattcgctggcgcgttgaacgcgacgtccattgagacgcttcgtaatcatcctgctgttgattttattgaaaacgatgccactgtcaagattagcgcatttgtcgaacagccgggtgccccttggggtctgtctcgcatttcgcaccgacagcgcggagcaagtagctacgcctatgatgacagtgccggtgaaggcacatgcgcgtatgttatcgatactggagtcgaggcttcgcatccgaaattcgaaggtcgagccgagtttactaggtcctttgttgccggagagacctctgatcgcaacggtcatggcacccacgtggccggaaccattggcagtaaagactttggcgtggctaagaaaaccaaaatccgtggaatcaaggttctgagtgaccaaggcagcggcgattactccggcattcttgccggtatggactttgctatccaagactctcgagaacgaccctgccccaagggcgtcgtcgccaacatgagcttgggaggcggctattcagctgccatcaatcaggctgctgcaaagatgatccagtctggtgtattccttgctgttgcggcaggaaacgacgcgaaggatgcctcccaaacgtcccctgcctctgagcctagtgtatgcactgtaggagcaacggattcttctgatagactttcctccttttcaaacttcgggcctgctgttgacattcttgcccctggaagcgatatcctgtcaacttggataggtggcgctactaaatctatctctggtacttccatggccacgccacatattgttggtcttggtgcctacttggcttctttggaaggcttccccggtgcacaggctctttgcgaaagaattcgctccctggctacaaaaaatactattagcggtgtcccaggaggaactgtcaatttgcttgctttcaacgggaatccatctggataa

SEQ ID NO: 352 - DNA, 378 bp, Metarhizium anisopliae
atgctcggctttgccaaaacccttcttcttgctacccagctggcatattttgccagtgcgtcgcccaccctcaacaataacaataagcttacgagcaaatggcccgtgtgtatccctcccccaacacaagtctcaaccaagcgaacgccgactgagaagcgagacgccagcgttacgactccgttgcccacccagccaggcatggttggcaactgcaacaagttctgctggatagagaatggcgacatctgcgggcagattgctgagagcaatgacatttccactaagcaattcatccaatggaacaaaggcgctggtccggattgcctcactctctgggcgaaaacatatggttgcgtgggcgttacggactcgtaa

SEQ ID NO: 353 - DNA, 7575 bp, Metarhizium anisopliae
atgggttctttagctgctaccgtcgggaatggggaaaccaacgaatcatcccttcaacaccctgcaactcatggtagccataccaacaacggccatacgatcaatggccatacaaccaacggtcatagcctcaatggccatttcataaacggccacaccgcaaacgataacggtactatcaatggctcgctaaacgggctcggctacccgggtcaaactcccatggccatctgtggcatggcttgccgcctcccaggaggaatagcatcggctgaggagttatgggaattccttttggcaaaaaagaatgcccggactcgtgtgcctgaatcccgctacaacgtctccgccttccactcccccgtttccaaaccaggaacggtggctacagaatacgggcattttcttgatgatagcgtcgaccttggggcactggacacatctgtcttccccttgaatcgcactgagctagaaagatcggacccgcaacagcggctgatgttggaggttgccagagaggcctttgaagatgccggggtgaccgactggagggggaagacggtgggatgctacatcggaaactatggagaggactggtctgagatgtttgccaaggaaccgcagcaatacggcttgcatcgaatcactggtactggggactttgtcatcgcgaatcggctatcatacgaattcgatatcaggggtcccagcgtcacaatccgtacggcttgttcttctgccctcatcggcatcaacgaggcctgcgcggccatcgcccgtggagattgcgaagccgccatcgtgggcggccttaatctgatcctggcgccggccatgaccatttctgaaacagagcaaggcgttttatccaaggatggctcttgcaagaccttctctgcagatgctaacggctatgcccgtggagaagctgttactgctgtcttcattaaaccattgaccgacgcaattcgtgacggcaacccggtccgggctgtcatccgggccgtaacgaataactcggacggcaagacgcccgggatatcacatccaagcactagctcgcaggaaaccctcatgagaagagcgtacgccatggcaggaatcaccgactttggggaaacagctatggttgagtgccacggcaccggcacgcccatcggcgatcctattgaggccaatgccgtggctcgtgtttttggagagcggggagtttacattggttctgtcaagccaaatttaggccatacagagggcgcctcgggtctcgtgtccctgatcaagatggttaaagcccttgagcaccgcacaataccaccccagatccggttcacggctcccaatcccaacatcccctttaaggaggccaaactcacggttcccctggagccaactccctggcctcaagatcgcctcgagcgtgtaagtctgaactccttcggcgtgggtggctccaacgcccacattatcctcgagtctgccgccatgcacaacgccgcaaccgtcattcacgccacgccggaagaacctcaactccttttatacacggccagttctgccaagtccctcaccagggtgattgacaactaccggcactgggttgagaggaacccctccaaggtcgccgacctggcctacactctggctaggaagcgagatcatgggccgcacagggccttcgctattgccaacggcggcgcaattgaaaccgtctcgccgcccgcaagcatcaagcccggcacgaagccgcccaatatcgtcatggtctttacaggtcagggcgcgcagtggccccagatgggtcgacagctatggcagtccaacgagaccttcaaggccagcatccagcacctggatcagtgtctccaagccatttctggagaaaggccacactactcaatccaggaggagctcaagaagccggccaagaagagccgcgtatcttcggccgagatctcccagcccctgtgcacggcaattcagatcgccttggtcgactccctcaaggccctgggcatcgtgccgcgtgccgttgtcggccattccagcggcgagattgcggccgcctacgcctccggggcgctcacagcgagtgaagccatcgtggcagctcatcaccgtggcgccgtgacgaataggcagaagagaaaagggtccatggcggccattggaatgagttggcgagatacggagaagcacctcgtgcccaacgtcgtcattgcctgtgacaactctcccaaaagtgtgacaatttcgggtgacaccgacaaggtcaaggctgtggtggccgatattcaaatgacacgtccagaagtgttggctcggctgcttcaggtagacaaagcataccactcgtatcacatggctgagattggagacgactacgcctcgttgattagcggccaagtgactggaaagagtccttcgaatgccctcttcttctctagtgtgacgggaaagctgctggatggagagcacaatctcgggtcggcatattggcgggcaaacctcgaatcccccgtgcggttccgtgaggccgtcacaaacctcctgaatcgcgaggttggcaagcatgccatctttatcgagattggccctcactcggccctcgcgggaccgctaagacaaatattcgccgagacctcttcaccttgtccttacctgtcagtcatgatccgcaaccaggattgtcttggatcctatctggctgccgtcggcaaactccattcactcaatgtaaacatcaacctcgacgtcttgttccccacgggttcttgtctaccagatctcccaaggtacccgtggaaacacgagaacacctgctggtacgagtctcgtctgtccaaagattggcgcttccgaaagttcccctatcatgatctccttggcctccgagtcgtcgagagcaccgagctcgagccggcctggcgcaacctgtttcacctatccaacacgccttgggtccacgaccacaagatcggggacgatatcgttttcccctttgccggctacattgccatggctggcgaggcggtgaggcagacgacgggcatcaacgacgggttcagcattcaaaatgttcttgtcagcacagcactggtcctccccaagggcaggcccacggagatgatgaccacgttccggccaaagagcctcacaacgtccctgaacagctcctggtgggaattcaccatggcctcgtacaacggtgacatctggacaaaacactgcacgggcgaagtcatggcgctcatgtccgacccaagaccgggacaggatcccgaaccccttcctcgcaaggtgaacacggacaagtggtacagcaacatgagcaagggcggtcttgaccttggcccctgtttccaaacacttgccaccattgagacttcaacgagtccagaggacaacagggccattggaaatgttgtcaacggcaggcagggcgatgaggccaactaccacatccatcccaccgtgctcgacgcgaccatccagatcctaggtgccgccgccaccaacggccagatgcgcaagaccaagacttggcttcctaccagcatggacaggctcagcgtctaccgttgctcgtcggacatggtcaccagtgtcagcgcgaggctgtcaagcaaccattccgtagtgggaggaggccgttgcacggcgggcggcgtcgtcgtcgtcgaggctgagaatatcaaaatgtcacttgcggccaactccctttcaaatgaggtccccgacacacacgcggccgcaaggtacgagtggagcgccgatattgactttatgaatgttggcgagctcctcctcgcaccagcaggtcgctctgaatacttgcatctcctcgaggagctcgggcaactctgcttgctttcctcgaagcgccgactttactcgacgtctaagccggtggtcctcgctcctcatatgctcaactatgcgtcctggattacgtccgcttccaaggtggtcgtcgtcaacctagcgtctgtcatgagcaatcttgacaacgagaacatctcggcccgcatccacgctctctcgaaccgtcttgctgatactccaatgtcgccggtcgctaatgccatccgcgagatatggacgaagatggatctcttgctgtccggacagacgctggaagatattctcccggaggagacactgtctagtgtcttgcagttcgtgcacaaatccattgactatggcccatttattcggcatctggcacactccaaacccaacctgcgcatcctcgagattggcggcgacagaagctcatcggtagccagtggcattgccgaggacctcacacgccccgatggccaggtgctctgttccaagtataccttgagctcgccaggctttgtctccagcaaggaccagccgatgctgctccccaatatggaatacaccactctggatatcggccaagatcccgcggatcagggctttgagggacaccaatacgacctcatcatcgcatccaacgtcattggggccaccaggaacccgcagcagagcctggccaacatcaagagactcttgagtcctaacggccgactgcttatgcaggagacttgcccgtcgtccaaatgggccacctatgttttcggagtcctcccgacgtggtggcaaggcaccgctgacgggtctgacgaagcagccgtcctcagtcccgaaatatggcagtcgaagcttgcggcggcagggctcggcagcatcgaagcaacggttctggatgccgagcagcctcaccaactcactgcgaccatagtagcaagacatgacttgccccaggagactgcccctagacgagtcactgttcttgtcgaagacgagaatggagctgccacccggcggatgctcagccgactagaagatgacggttacgccgtgacaaggtgcaagttgaatggctctccgccagtcggacaggatgtcctctcctgcctggacctcgacaaacccttctttgagaatctcagcgagccacgatatcagctcctcaaagacttcctcctcggcctcggcggcgccggcgttctctggatcacggctctcagccagcggggatgccgtgatccccggtacgcccaagtcttgggtctcgctcgatgtgtccgctccgagatgattgccgactttgccacgtgcgaggtggacagcttcgacaatgcccagtcgatggacatgatcccccgggtcctggccaaattcgagaagcgcgacgacgacgccgacgacgccgtaaagtccgactttgaatgggccattatcgacggccaggtacaggttgggcgcttccacaaattcgtgctgcgagacgaactccttctgtcggaacccgctggaatggcctcccttgatatcgggacgcctggcctagtcaacagtctgcgttgggtgcaacagccgcgcgaggccgagctgaagccgggcgatgtagaggtccaggtgcactctgtaggcttgaactttcgggacatcctcgtggcccttggcatcgtggaacttccggtgcgccagtttggattcgaagcagcaggcatcattacacgggtcggaaaggacgtggaccccaaccagctcaaggtcggcgatcgcatctgctgcttgaagaagcaggcctttgggacttatattgtcactccggactatagttgtactcatgtccccgacaacatcacatttgatgaggccgcgtccatgatcatgccatatattacggctatccacggcttgttcactactgcacatctttcaaagggtcagaccgtcttgattcacagcgcatgcggtggcgttggtctggccgctgtgcaaatttcccaaatggtcggcgctgaagtttactgttccgtcggcagagaagacaaggtcgagttcctgatgaacaacttcaacatcccgcggaatcgcattttctactcccgtgacaagtcctttgttggtgacgttatgcgtgagactggtggccaaggcatggacgtcatcctcaactccctttccggcgagctcttgcacgcaacgtggacatgcgtcgccgagtttggcaccttggttgaaattggaaagcgagatctgatcggccgtgggaaactcgacatggagccctttttgaagaaccgcagctactgctgtattgacattgaccgcgtctggtcgaagccgtggattctgagaaaacacatgctggacgccttcgactggtgtgccaagggtcttgtcacccccgttcgacccgtcaaatctttcccagccagtcaaacccaggacgcgttccggtacatgcaaaaggggtttcacattggacgaattggcatttccatctctcacaacccagaacacccggatacccagtttgagactgtcaagatggcccgacccatcacatttgacagatccggttcctaccttcttgttggggggctcgggggtctcggccgcgccatttccgtctggatggccgagcacggcgcccgcgaattgatctacctatcacgaagcgctggaggggacaccaagcacgacgtcttcgtggccgagctcaagagtatgggctgcaacgtcaagctcatccagggagacgtgaccaagctcgaggacgtcgagaaggctgtcaaggcggcgacacatgcccttcgaggcattatccaaatgtccatggtgctgcgtgaccaaaactttaccaaaatgacctttgaggagtggacgggtgcgacagcccccaaggtcgagggcacatggaacctacaccgtgcctccctgtccgctggtacagacctggacttttttgtgctcttcagctccgtttcgggaatcatcggccaaccaggccaggccaactatgccagcgccaacacctttcttgatgcgtttgcccagtaccgcaagggcttgggcctggcagcctcggtcgtcgacgtcggggccgttgaagacattggcgtcattaccgagcgccaaggattaatgaacaccatgaaagcaaccggcttcaagggcgtcacagagcaggaactcttggacgccatggtcttggcaatgtttgcccatgctcggccgacggggcagggaaatagtccaggcttccactcggcctttgtcgaggccaacacgtttgtcctcggcctggactcgtcgataccgctgagtagtcccaacaaccgcgccgtgtggaaaagagaccgtcgcatggcggcgtaccacaacgccgctgccaccggtgctgaagctgccgcgtccaacgatggtctcaagtcgttcctggctggtgccagggccgaccctgctgtcctcagctcgccggagacggctaacctgttcgccgttgagattggcaagaaactctttcacctgctgctcaagccacaggaggacctcaacatagccttgcccttggtcgacctgggtctcgactcgctcgtggcactcgagctcaaggcctggtggaagcaggtcttctcctttgacatcagtgtgctggagatgcttgcgatgggatcccttgcggcgcttgggaaacatgccgccgatcagatgatcaagattaccgccattgataaggacgcgtcctga

SEQ ID NO: 354 - DNA, 1683 bp, Metarhizium anisopliae
atggatcaacaaccagaaccggaccacggacaaaatatcaggcgaaggcgtagtcggcagtcgtctgcggcgccgtccgtccagctagaagcgaatgcagctcctgctttacctcaacgggcaggacggccgctttccttttggctcgccttttccggtctctgtatcaacacgtttctcttcgctctcgactcgtccactctctccgtggctcttccagccattgcgcacgagttgcatggcacaactttcgagtcgttctgggccggaatcgcgtaccttctttgcgtggtcatcacccagccattgtacacctcactgtccgacgtcttcggtcgcaagcctctgctctatgccgctctcctgctctttgccatcggctcgctagtctttggtcttgccaagaacatgacgtatatcattgtcggccgagcgtttcagggctttgggggcggggggatggatctgctaagcgagatcatcataacggatataacgacgctgcaggagcgtgccatgtttctcgggctgctggctattcccatcgccattgggaccatcatcggtccaactatcggcgccgtcttcagcgaattcatctcttggcgatggatcggctacgcaaacttgccctttgtcggagtctcgttccccatcacattctttttccttcgtctccgtacggtcaacgactccctcatggacgatgtgaagaggctggattgggggggcatggctctctccttcaccggaatgattcttttcgtgctacctcttagttggggcggcgccttgtactcgtgggcctcatggcagacacttgtcccgttgattatgggaatccttattctggttggttactttgcctacgagtcactacccgccgctccgatcatgccctatcgattgctacgatctacaacagccaaggcgacactgctggggaactttatgcaaggcttcgttctcttcccgctgcaacagtacttgttgctcttgttccaggcagtctacctactgagccaaatcgacacggctgtggagctgctccctaccagcatcacatgcgtcttggccgccagtggtgtggtcatcaccataggtctcctcaaatctggatatctatggagtatcagactgttctgggttgtcctcacagtgggcaccggccttgtcgccctgttagatgaaggctccccccgtgctatgcgaatggccatccccatcatctggggcgcgggtataggcgcattgttgcgtctcctccaccttccaatgcaagcaagtgtcgaaaacgtggatgacacggggctggccgtcgggctcgtcctttggtttcgcctggtgggaggcctcctcggactcgccgtctcatcctcaatatttatcagtgtctttgccaagtccattgccggcgttgacaacctccccgagtctcttgctcccctgagagaagcgagccgggccattagctttataccaacgctgagggatctgggtctttcccgggacgtgttgggcctagtcttgggagcttaccacaaagctttccagacagtattttacgcaatgactgcctttggcggtgttggtttcgtaagctcactatttaccaaggagctcactctgcagaaaagcgaccttggccggcaggcgtttgagggacagcaattattaccctaa

SEQ ID NO: 355 - DNA, 978 bp, Metarhizium anisopliae
atgtggcgcatcccaacggacacccctcaaacttccactcccaacggacgcaccaagctccaggaagtcaccccagaaacccccttggacgaaatcttccaaaagtggggagaagatggcgcccttgtcatcaaaggcctcctcacccctggtcaagtagccgaattcacctctgaaatcgaacaagtcattgaaaaaactcggcgtggcgctctgctggaccacccgctccttcaagcctttcacggccgccgaacgaagcgcgccgccggtctcgccaaccatagcaaggtgtttcgcgagaaccttctcgagaacgacctagttcatgccatatgccaccgcaactacactacgggaggcaacgccggcgattactggctgtccacggggtcaactttgtttgccggcggtccgcaggacccgcaggagctgcatcgagacttgaacaactaccctcctgccgtcttgcttggcccagactttgacgatgtgcaaatgaactttctgattgccctcagcccgttcagggaggacaacggcgcgacccgggtcatcccagggagtcagaagtggccctttgaccagcgcggcaaccaggaaatgacgatcccggccatcatggacccgggcgactgcctccttttgagtggcaaggtcgtgcacggcatgggtgcgaatacaaccacggaggagcgaaaggcattgcagctgtctgtttgcgcaggctatctgacgccatccgaggcgcatccgagcattgtcaccctagagactgccaagaagctgtctccaagggcgcagcgatttttgggtttccggtcccagtaccctagggggtcacctggattgtggaccaaggattacactgagctggctttgcatttggaactggatgatcttgatggcctgatggtttatcttcgtgaccttgcgaaaagtcatccagttgaagacccggttggcaaattgttttag

SEQ ID NO: 356 - DNA, 1131 bp, Metarhizium anisopliae
atggccaaatcctatcatttgtccttggatattgctaaaggcatccctaagactctccttctcaaccgacaaccctcaatctctcacctgagagcaaaagaaggacgtgtggatcactcgatgatgaagcgacccgaggattttcgcggaaaggcaagttttctgctctgcggggataccgtctttgttaccggggggtctgggggattgggcaaagccatatcccagcagttagcagcccgaggggcccatatcacaattttctcccgcaggccagacgcacttgccagggccagagaggagatactttccaagtgtttgactggggatcaggaggtcaataccgtcgccatcgacatggcggatgcttcaaaggttgacgaagcatttagaaaacagcctcggattgctgacgtcttgtactgtgttgccggcggtaaccatgctgagaacggatttctcgtagatattaaggcacaggctcttgaaagttgcatgcggaacaactactttaccgccgtgtacgcagccaagtctctgctcgacatatggacagaggatgatttgaaaggacccattcatccccgccctgaccccaggatacgtcagattgtctttgtcacaagcgccgccgcgtttttgggttctccgggctccatttcttacactccggccaagtgtgcaacccgcgcctttgcggatactctgcggttggaagtgctgcggtactgctgccccgagtcgacctactcgatccactgcgcctttccaggggactttgtatcccctggatttgtcttcgaacagaagaccaagacgaatctcacaaagcgcattcagggtctcgacggctacaccatgtcggagctcgaagctcggttcccatcttcggacaagatcgcttcactcatcacttccgccgtggacaggggcgatttcatcatctgtgacggctcgctggctggctcattgctcttcaccaacatgattgggccgtcaccaaagaggggattgggcattgtggattctttgctttctgtatttaccgggtgtcttctctggccatatctcaggtggaaatgggagtccatgacccgcaaggacggcgaagagcacagaagagctaggtga

SEQ ID NO: 357 - DNA, 1401 bp, Metarhizium anisopliae
atggatttcctggcggattttatcaaggctcagaagatcaaggggccccagatgaaagatgccccaaccttctaccgcaacctcgaggaggctttggacctccggcgatccgatcatggcatgttcaccaacggtatgaagagtccctggaagtcaggcaaggccgtcgacttttgctccaacgatcttctgtccctgggaaagacgggactgcttcgcaaggagttcctcaacgagctgggccgtaactccgacttccccatctatgcaggaggttcgcgcctggtggacgggaactacgattacattgaacaagttgagcaggaaattgccgccttccacggcgctgagatgtcactcattgtcggctccggtttcgaggctaacaatgccatctactcggcaatcccacgccccggcgacgccatagtctacgacgagctcgtccacgccagcgtccatgacggcatgacgcactcgctggccttgaccaaggttgccttccgccataatgatgtcgacgccttgagagatgcgctagtagaacttgtcgactcacagcccttgatcaaggacggctcgcgcacggttcttatatccgtcgagtccgtgtacagcatggatggtgacgtttgccctctacgcgagatgcttgagatttcccgcgaagtgtgccccaagatgaattttgcttttattgtcgacgaagcccatgctacggggataattggccccaagggcgtaggacttgtcagtctcttaggtctcgagaaggagattgctattcgactccatacatatggaaaggctttggcctcgacaggagccgccattttgagcaacggaacggttcgaacggctctgctcaattttgcccgctccgtcatctacaccactggcccttcctttccttcggttgcatgtattcgagcagcctacaacttgatgcgcaacggagaaacgacaaagttacaaaacagcatccagcatctcgtgaagcactttttcgaaaccatcacgtcgaaccctgtgtgggaaaaagccagcgagatggggattctggccatccctctggtcgacgattgggaaggacgcgagttccagacgcacattgtacccctctggacacggcagcggtataactggtggctcgtattccatctgcagttggcgggaattgcggccgtccccattgactaccccacggttccaaagggccagagcaggattcggatcatggttcatagcgccaacacggaggccgaggtcgattttcttgccagcaccatatgtgaatgggcacaagagatgattggcattgaggagtcgggggaggtcaagggaaagacgcccaaagccgctcagaaaatctacgccttgatggctgctgctagcgcttga

SEQ ID NO: 358 - DNA, 1653 bp, Colletotrichum orbiculare
atgtccaccacccagcttcccgtctccgacgtcgacagatacgactatgtcgtcgtcggcggtggtactgctggctgcgttatcgcctctcgcctggccgaggctctgcctcagaagcgcatcctcttgattgaggctggtcccagcgacttcatggacgaccgtgtgctcgacctgcgcaagtggctcgaccttctcggcggcgagctcgactacgactaccccaccaccgaacagcccatgggcaactctcacattcgccactcgcgcgccaaggtcctgggtggctgctcgtcccacaacaccctcatctccttcagacccttcgagtacgacctgaagatctggcagtccatgggtgcccacggctggaacttccacgatttcatgcgcgtcatggacaagctgcgcaacaccgtccagcccgtccacgcccgccaccgcaacgagctctgcctcgactgggtcaactcttgcagctccgccctcgacgtccccatcctccacaacttcaataagcacatcacccaggacggtgccctgaagcagggcgtcggtttcttctccatctcgtacaaccccgacgacggccgccgctcctccgcctccgtcgcctacatccaccccttcctccgtggcgacgagaagcgccccaacctgaccgtcctcaccaacgcttgggtctccaagctcaacctcaagggcgacactgtcaccggtgtcaacctgaccctcaacgacggctccaagcgcaccatcaccgccaagaaggagaccatcctcactgccggcgccgtcgacactccccgcctcctgctcctgtctggtatcggccccaagcagcagctcaacgacctcggcatccccgtcatccacgacctccccggtgttggtgagaacctccaggaccaccccgagtccatcatcatgtgggagctcaagcgccccgtcccccccaaccagaccaccatggattccgacgctggtatcttcctccgccgcgaggcccccaacgccgccgccaagaagactttcttcaaccccgacggtatccccgacggagatattgccgacgtcatgatgcactgctaccagattcccttcaccctcaacacgggccgtctcggatacgacgagcccaaggacggctacgccttctgcatgacccccaacatcccccgccctcgctcccgcggtcgtctctacctcacctctgccgaccccaatgtcaagcctgcccttgacttccgctacttcaccgacgaggagggttacgatgccgccaccctcgtctacggcatgaaggctgcccgcaaggttgcggagcaggctcccttcaaggactggatcgcccgtgaggtcgctcccggccccaaggttcagaccgacgaggagctctccctctacgcccgtcgcgccgcccacaccgtctaccacccctgcggaaccaccaagatgggcaacgtccgcaaggaccctctcgccgtcgtcgacgagcgtctcaacatcaagggcctgaagcgggtccgtatctgcgacgccggcatcttccccaccatccccaccatcaaccccatgcttaccgtgctcggttgcgccgagaaggccgccgagttcatcatcgaggaggcccaggagactgcccgtctctaa

SEQ ID NO: 359 - DNA, 2115 bp, Colletotrichum orbiculare
atgcagcaatcgtcagaggcccagcggtccgtttcaaaggcccagttatcttgcactacatgtaggacgcgcaaggtcaaatgtgatcataagaaaccagtgtgttctgggtgtgaaaaatatggagttgactgcgtgtggcccgagaggcggaagaacacaacgcgtaaggaaaagaggctgtatgagaatatcgtcgccaggctggcgcagatggaaagctttgtaaaagaacttcaggaggcgccggcgaacgtgtcaccgcctggtcccaaaactccggatagcccaccgtcgccaacgcagaaggagtcccggacgagtcctcagagtgcgaggaggacttcatcggctactggagcgtctcaaatctcaccacagctgccgccatcaccggccacaagctctccgagagcctcgaagctctactacaccggagcagcctctgaagcaaccattgggacgtcgggccaatgctcgctattttcgctcgagggcatcgcaaagattgataccctcgtgggagaccggcgcttctcggactgcgttcgaaacctgctgcaaaacatcaggactttggcaccgcagcgaagcattgactttgcggcttcgcagcgggactacccttttccttccaacgatgtcatcatatttgccatgaacgacttcttctcgacccttaatcgaggtatcagactgcttgaagaagctgaagtgagagctgccgtgcaggcctacatgtacggtcagccattgaatcagccgggatggaaactggccctcaacgtcatcctcgcccattctctccgcaagcgagactggcactcccagtcccgcgagtacgagagatatctctacaacgccctgtcgctcatccccaacgccatcttgcagacacccaaccccatgaccatcggggctctcctatctctggcctcctggttcgtcttctcggccgagaaccacatcgccgtccccatcctcgccgtcgccacccagctcatcctcctcgcgggctaccacaacccagaccacccgcactgcctcaagccctccgagcaggacaccctccaccgccgccggctcttctggcaggcctacgccatggaccacgacctcatgctgcgcatcggcaaaccgcccctcatcagcgacgacttcctcctcgacctgcccgaggagttcccccacgacggctacggcgtctactacttcccggacaacgtcgccctcagcttcttccaccagcaggtccgcctcgcccagatccagggccagatcttctccaagctctacttcaaaaccgacgccgccatatcctcggcctccctcgagtccgagattgccgccctcgacgccgagctgcaggactggcgcgagggcatccccgagatgatccgccccgaaccgggcggcgcccgcctccccgacgacgacttcaaccgcaccatggccctgagcgtgctgcacttcatgtacttccagctcgtcgtcgccgtccactccgccgcattccgcctgcccctcctcgacgacgacaccgaggccctgcgccccagcgccgcgctctgcgtcaacgccgcgcgcgccgccattgccctcctccggcgccagaacctctcccacccgtttacaacatacgtcctctaccaagtctcatggagcgtcgacatcctcttcgtcaacatcctcgagcacaggtccgccccgcagtccgcgcaggacctcgagctcatcaggacggtgctcgccttcttcgagcgctacgacgccaaccaccagcgcgtgccctcgtaccacatcatcaaggccctctgcgaggtcgcatcctccgtcgttctcggcgcccgggccgtcaccccggaacccgcgccgccctctacttttcagcggcagcccgccgtcgcagaacccggggtgggtgggtttgcggcgccgtctattgtgccgctgccggggttgaatatcgacatcgactggggcagcgtgtcgctgggcgggcatgactggttgtcggccgggtttctgcagatgacggattggggggtgcaggcgggggctggtgggatggagtttcaggtagatccggatccgacgggagggagtcacgggtga

SEQ ID NO: 360 - DNA, 1635 bp, Colletotrichum orbiculare
atgctcgccctcaagttaacgccgctcctggctctcgcgcccttggccagggccgacctcaaaatcacccaaccggacggcagcaagccggtcgacctctccgccgagtctatccccatcaagtgggaagaggacgcgacgacgcggggccccaactctacccgtatcaacgacaacacgcaggtggacctgtggttctcggccacggtgtccaagaccgggaattacttggcggcgctcttggcggaaaacatcaccatccgggatgccgacgggttcgactgggaccccgaaaacgccaccgactggttgagcgtgaacgacgagggcttgaccgacgacaaaatctttagcatatacgcactcgtccaccaaccgggcgcgaacggcaacaccccggtggagagctccaagtttgcggtagaggggtttgagttccaggaggacgcgaccgttggcagtgttggaagcgcgttgaagccggctgtgggtttggttgttgccagtcttgcggctgcttgcaatgcggagaaggcttccacagccggtacaggcactgcttcaatccgaagtctgttgctcaaacgacttgtcaccatggggaatacaatctcaacattcttcccgccagcacccacgttcgcagaagacgaaatcccgagccagaaggggcgcgtcttcatcgtcactggcgggtactctggcgtcgggtacgaactcagtcgcatcctctggcgacacggcggaacggtctacattgctggaagagatgaaagcaaagcccagcaggcgatatccgatctcgaacaacaaaagacgacagactctgtcgatggcggacttcggttcctcaaagtagctctggacgacttcaacagcatcaaggccgcagcggaaaagttcctcgcagaggaaaagcgcctagatgtcctcttcaacaacgccggcgtatcgaacccgcctgctggaacggtatcggcgcagggccacgaagtgcagttggcgacgaactgtctggctccttactttctcaccaggcttttcagtccgttgctcatctcgacggcgaagctgacggatgcccctggagcgacacgcgtagtctttacgacctccatcgccacgcagctaggcgccccacgtggtggaatcaacatgaaggatgtgctcgtcccgtcaaaggaccagcaagtcaactacgcaacctcgaaaaccggcaactggttcctcgcggaccatttcgcaaaggaactcggtcctcacggagtggtcagcgtggtgctgaacccggggaacctcaagacgccgttgttgcgacacatgtcctgggttgtccctattgttgttgcgccgctgttatatcacccgagattcggcgcgtacacaaacttgtttgccgggttgtctccggatgtcacggtagaagacggcggcagatggattgagccctggggccggtttcatccgaatcctcgggaggatatcattgaggcaatgaaggatcgtcaatatggcgggctgggacttaaggcggccttggttgaacattgcgagaagttcacgcgcctcggccacgtctcgttgcactgcagatccagtcagggccagttgtgccaggaagccagacggaggtaa

SEQ ID NO: 361 - DNA, 837 bp, Colletotrichum orbiculare
atgaccatgctcaaattcggcccggttcctggcgagagatctccatgtcggcatctgcattggcgagaaggctccctgaacaacagtgtagaggggcatttcggtgagaagccggtactcaccaccgatggaatcaaattgcccagatccttcaacgcatggagcttggaaacgataagcggcatcggcatttcattcacggacaacctagccgaccatcttctactggtggaagacgagaagggcatgaaggtttgcatctttcaccacatatcgttcctcaaattctacaagaacgccgtattccccgagggtctccttcaagagaccctagatacactggctctcatctttccaaacagcgaattcgggacggttgggggattcatgtgccggcgcagaaagtggctggaggagctctggtcgcggcacagagaccagtgcatagacaccgggacaggaaccggcgagagactgcaggctgaagcaagacggatagagaagttcaggttctggagagaccgtcttgtcgtgctgaagcaggcgtacgacgacgccacgccaagcagcatgtcccagtggtggcacgaccggcggaaccgggtggtatggtgtactttctggattgcaatctttgtactcatcctccggcgtgattgttggcgtcgtgcagtcggttctaggcggtattcaagttggggcaagctgaggcgccttggactgcgaggcaatcctcttttttttttccttctcttgctccaaaagctcactgccaacattgtcatctacgcaagcttattgggtgtcacggccaggaacatgagccaatgccgataa

SEQ ID NO: 362 - DNA, 3216 bp, Colletotrichum orbiculare
atgcccatcatcaggcagccctgggagcatgcgctggcatcatgcggtctgcccatcgcgacaaatgggttgagagctgggctgagggcttggtggcccgttggcgtagcccacgacatatatgagactcggctcaagtccagtgttgacgagcttgcgacgttgacaacggtcgagcatgccgtcacgttcattcgcctgtacatggtgggaaagtcggaggtcatggcgcaagcagtcatcatggtattttgcatggacgagcgggcggcggaaacgacgaaagaatgccctaaaaaaagtggcattctgaagggcttcacgggcttcaccctgggcgcgggttctctgccgttggagcttcagcgcccttcgcgactcttggctggagaaagcagtcgttcgaacctcggccaagccgcggagaacagtcttcggaacgcagatgtgttttcgacacatccctcgcctgttatcggcagacgctttctgaggaacgagggaggtgggcgtctgacatcatgggccgtgggaggggttgtgctccggtgggacgacaccttcttccagctcacagcggagcatacatcgacagaggaagaatccctcgatgagacatttgtctcttctccaagcatcagaaagtgcaccatcgatggtctggaggacatggacgactcttcgagtgacgtactcgaccacgaaatcctcagtcacggaagtgccacacctgaactgagcctgtattcaccaagcttcgtctccaggggggatacctcggatcaaatatcattggaagacggcagccttgccaactccatcggcatctgggaacccgatgataccttctcagtcaaggagaccaccggtagctctgacacgcccggtacatccttgtccacgacatatggtggaccacagccatcaggggatcgagactcaatcggaaaggtgggatccgtcgctctccagtccagcgagggtagccagcccggtctcgattacgccgcggtagccgtcgacgtatccttggactcggattttgtcaataacatcagcatcatcgatgacggtgctcggaaactattgagagtcagcgacgttgctacctcttccaacagagagaggcgagtgctactggcaacgcaggcggacagcttcaagacaggattgatcctcccaggaacgacgctgttcagcaagaaaggatccagctcattcgaaaatctcaagaccatacagttggacgagacagtatctttgggcgactgcggatctgcagtcatagaccgagactccggagctcttcacggccacttggttaggggctgtccaggcacaggtacggcctatgttgtgcctgcattcgacgtcctgcaggatctcgcctcaagaggcatcaaagccaggttggcaccttcggatgccgattcggtggagcttacaaagcagctctcgattcaacatcgaggcaaatccgctctcaccctagggatggaggaacttaggccaccagagacatcgggacggtacccaacaaggcaacactcatcccatggcgcagcggccaactggtcaaacattttctcgacacgtcgccctgtcggttatgacgactttgatttcctcaatcttacttcatgttacggggttagacccgaagatgaagtttgggacctgatcttcgatgatggtctctcgacagaagtcttccaagccgaagaactacgccgattttgcaagaatgtcactattgatggtcttcggagacatgaattccaaaagccttgcgtctggctcgatgatcgagactctctgagaaaaaagaaattgacaaggtccggatgcgttacaatcagcaatctttttcgtattctacgggaaaagcgagttgaggataccctcaaagcggacagacggttgctgtatatcccacgtttcagccccgaagctgcattcatcctcgccgcgtgcctcggaaaagatggacacatgctcggaacgctgatgtatcatcatctcacgtccaggcctctctttgacgtcgaaattcggaacaatcaacagtttggcatcaagttccaaataccctactacgtatggcgaaactcggaaaacaccagagacctggcctcggaaacgaacgtcaacgaggatggtgcgcaattgagtgacatctccttcctctttgataatccacgagcttctgcagcctcgacgtcgcaaactttgtaccgaagccagatgtcgttcatggtgctagggtatgataaatggcggtggactggctatttcatggcggatcgctttctcgagtcgcctgggaactgggatgttttccatggagatgaagaacacctaccatacggcttcgaaatcgatccaattcgctcgcactttgtcgatcctatttcactaatttggtcacctcgccaatatttcctcgtggtactcgaaacccgcctgaagcaggtggccaaagagtgggctcatgttgcgcgccgcctggagaaagcttcaaaatgccaaccttcatcattggacgttgggccgattggtgttgctgcctcgagggcaaacaacagaaagcccggctcgtggagaagccggtacattgcgttactaaccgaactcctccagactctctcagagaccatcgaggcctggaatcaattcgagagtcgcgacctgaccacgtcttctgacttttcgtccgaggacaccggttctcccacctatggggagttgcttcacagcgtcagaaggtcggcaggcgggctcaaactgtgccgcacgatgttggaaggacttcgtggaagatgcgagcgcgaagtattccacgaacagctgcaaaccgactctgacgttgtgtcacctcgtggacctactgaagcctcgaacttttatcttcagtacattctcgcagcattaagctccaccctgccgatcctggcagccgccagcctcgttgacatggacttcatattcacatcgactccagtagccttcggcgtttatgttgtgatattcatggccctcccgacgggcatcgtaattgccttgaagtcaggaagtatcttgcggaggagagttgcaaccgcagtacattctcgccctgcttccccttctgtggagtggagtggcgagcttcctcaccgccgacggctaccgactcttccattgttcaggcggcccaaaacaagagagattttgtga

SEQ ID NO: 363 - DNA, 6858 bp, Colletotrichum orbiculare
atggcgcccggcgtcctgtcctactcctcctccgggacatcgccatcagcaagtcctgtcatgatgaccccgatcgaccactccgacaccacttccgatggcttcactagtctctcggttggacccctcgacggagtcggcctcggcgtcaacggccagcacacgaacggccactccaatggccacacgaacggccacacgaatggctcggcctcggccgccccggtaggtggcagcgacgccggactgaagcaaatgcccatcgccatcgtcggtatggcctgtagattgcctggtagcgtttctagcccggccgaattctgggagctgtgctcccgcgccagaactggcttcactcccgtccccaaggagcgcttcagccacgaggcgttctaccaccccaacccgggcaagaccggagcttaccacgccactggcggtaacttcctggatgttgatctggcgtcgttcgacgctcccttcttcggcttgacggagaaggaggctatctcgatggacccccagcagcgtctgcttctcgagtgcactttcgaggctctcgagaatgccggtatccccaagcacacgattgttggaaaagacgttggtgttttcgtcggtggtagtttcgcagagtacgagagccacttgttcagggatagcgacacgatacccatgcaccaggccacaggatgtgcccatgcgatgcagtccaacagactgtcacatttcttcgatctcaggggcccgagtttcacagccgacacagcttgttcggctagtttggtcgccctgcacttggcttgccagagtctgcgcgctggcgagtcaacctctgccatcgttggtggttgccatctgaacatgctacccgagttttggatttccttctcgtcgtgcagattgcttgcagatagcggtcgctccatcgctttcgaccagcgtggaaccggtttcggccgtggcgagggttgcggtatcatcgtcctgaagccacttgaccaggctatcaaggataacgataccatccgtgccgttattcgtggcaccggcatcaaccaggatggcaagactcctggcattaccatgcctagtggcgcagctcaggagaaactcatgaaacaggtctacagaaacgcaggccttgacccccatgataccggctatgtcgaggctcacggcaccggcaccaaggtcggtgacccgatcgaggccacggccctccacaacgttttcggtcacaacaggtcagccagggaccctcttttcatcggatcggtcaagtccaacatcggccatcttgaggctgcatccggcattgctggtgtcatcaaggccgccctcatgctcgagagaggcttcctcttgcccaaccacgacttcaagcagcccaacgagaagattccgtggaaggagtggaacatgaagatccccgccactcagagaccctggcccaagaacaagaagtacatcagtgtcaacaacttcggtttcggtggcaccaacgcccacatcgtcctcgaaaaggcccccttcacccttcccaagaaggacaggaagggtttgcccccaccggagaacaccaagagaaccaagactggcaagaagctttacgtcctgtctgccaacgacaagaactccgtcaccgcagtcatgaagaaccttgtcgtttacctcgagcaacgacctgagattttccagaatgacttgatggacaacatcgcctacactcttggctcccgccgttccatgcttccttggagggttgccattcctgccgacgactcgtttgagcttattgagacgcttaacagcggcaaggtcattcctggaaaggagggtgagccgctgagaatcggattcgtcttcaccggacaaggtgctcagtggtggggcatgggccgcgagctttacagccactaccctgtctacaaggccgccatcgacagagccgacgagtgcctccgcaagcttggctctgaatggtctctcttggaggagttgaacagagacgccgactcgtccaaggtctctgatgctcacatcagtcagcctgcctgcagtgcggtccagcttgccctgaccgatctgctccgcacctggggtattcgccccgtggccgtcgctggtcactcttctggcgagattggcgctgcttacgcagctggcatcatcggattcgacgccgccatggctgttgcctaccaccgaggtagacttattcctatcttgaagaagagacacccagagcttcagggtgccatgatggcagtcggcggcagcaaggaggaagttcagcccatgatcgacgctctgaaggagcagcaggtccgcattgcttgctacaacagtccctccagcttgaccatctccggtgacaccccggctcttaccgagctcgagaagattctcgaggagaagcagatgttcaacagacgcctgcagattgagactgcgtaccactcgcaccacatgaacttggtcgccaaggaataccgcgagtccatctccgagctcccccacccccatactaccgatgtgcgcttccactcctctctctacggtcaccagatcgatggtttcgagtgccaggctcactactgggttaacaacctgacctgcgccgtccgcttctctgaggcccttgagaccatgcttgagcctgtcggtgaccacaagcacggtgtcaacatgatcatcgagttgggtccccactccgctctccagggtcccatcaagcagatcctcaagcacgttggcgagtctgcgacaaagattccctacgcctctcctctcatccgcaagaaggatgctgttgactcggccatggagctggctggcagtgtcatcaccaagggagccattctgaacatggacgcaatcaactttcccacgtccgccaagaagcccgcccttttgactgatctgccccggtacgcctggaactaccagaataagtactggcaggagtcccgcatgacacagatgcacaagtaccgcaagtcgccgaggaacgacttgattggtctcgaggccatctactccagcgatcttgagcccacctggagaaacattgttcatctcgacgatcttccttggttgcgtcagcaccagattcagtccctgactgtcttccccatggccggtttcattgccatggcactcgaggcttctgcccagtgggccaagcgcaaggagatctctttcgagaagtttgagctcagggatgtctctgtcgtcaagccattggcactcaacgacaccgatgtggagatgaccatcaatctgcgccctcaccaggagaccaacctcaccgcctctgagacgtggaaggagttccgcatctgctcctggaccattggcagcggctggactgagcactgcgtcggccttattgccctccacggcacagagaccaatgaggtcgacggtaaggagcagaagcttgccgcccgccgcggagccgaggctaccatcaaggctagcgagggtcccgactcagttgctgtcaacgaggccgacatgtaccagcgcctgagcgagctcggcgttggctacggtcccagcttccagggaatcaaggattgcaaggcctccaacaagcactctgttggcagcattacctccgccgatatcgttgcggacatgcccaaccactatgccaccagcactgttcttcaccctaccttcttggagtctcttattgagatgtactggccgatcctcggagccggccgcaccaatctcgacacagtatacctcccatcttcgattgcgagaatgaccgtcgctcgcgacatcaccgccctcacaaaggaggccggcagctctttgaaggcttacgccagggctgacttctcggccaccgaggctcgccccaccaaggtctccatcttcgcgacgtccgagtccaaggacttggtcatcgagattgatgatctcactgtctccccgatcattgacggcgagactgagcgtgccaacaaccccgcccgtgagctctgctacaaactcgagtgggagaacattggcgatctcaagtccctctccggcaagaagaagagcagcgccaccagtgttaaggttgatgctcccctgcctgacgtcgacctcgccatcatccacggcgagtccaactcccagcagatgttggcaaacggtcttgccatcgcccttgccagctcgacgtcgagactcccagagatgggcgctctgcacgaggtcaacactgaaggcaagctttgcattgttctgaccgagctggagcagcccttcctggcgaaccctaccaaggagcagtttgccgatgtccgcaacatgctcgccggagttcagggctgcctctgggttgtgcgtggtgcctacgacaaggctacgtctcctgagtcgaacatgattgttggtctcagcagaaccgttcggtctgagactgtcttgccattcgccactctcgatcttgatgacgccaaccagctggacgaggacgatgcttctgctgtcatctatgagatcttcaagcttgccttcaacaccaacgccaattccaccagcgagcttgagttcatggagcgctctggcaagtttttcactcctcgcatcgtccacgacgaggacatgaacgagtatgtccaccgcgagaccaaccccagcattgtggagatgcagcccttcggcaaggatgaccgctgcctcaagatggagtttaccaccccaggagccatcgagaccgtccacttcgtcgatgacgtttcggtcagccaacctcttggtgatgacgaggtcgagttcgaagttaaggctgttggcatgaaccttcgcgatgtcattctcgccaagggtcaaatcccagacgccagcaagcacgctctcggtgttgaggctgctggaattgtcaccagagtaggctccgctgtcaagtcccacaaggccggtgatcgtatcgccgccttgactatcaagaacggtgcctacgccacccgcacccgcaccacggctgcgagcgtcatgtccatccctcccaagatgtcatttgtcgacgccgccaccctgcctctcgcctactgcactgcctactacagcttggtcgagcaagcccgtcttcgcgagggccagcgcgtgctcgtccactctgccggtggcggtattggacaggcctccgtttgtcttgccaagatgatcggcgccgaggtgtttgtgactgttagctctgcggacaagaagaagcttcttatggcccactacaatgtccctgaggaccatatcttttacagccgcaacaccacgtggagggctgcagtccgacgcgccaccaatgacgagggtgttgacgtcgtcctcaacacccttcctggtgctgatgctcttcgggagagttgggcttgtctcagccgcttcggttgtctcgtcgacgtccgccgcaacgatggttctcgtgccactcgcttggacatgggccagaatgacagcaacgcctcgttcctgagcgtcgacgtcttcggccttgctgccgagagacccaagatcatggagagactcgtctccgatgtcgctaagctcctggctgatgacgagctccgtcccatcgaccctgccaccgtcttcccagtctccactatggagaccgctttcaagacgctgcaaaccactcagggccctggcaagcttgttgtcgtgcccagcgctgacgatgtagtcatggctactccttccaaggcgaaccaggaacttctcaaggccgacgctacttacctccttattggtggtactggcggtcttggccgcagcatgtccagatggatggttgcccacggcgccagaaatctcgtcctcctgtcccgcagtggctccgcaactggcaaggtcaaggaactcattgatgaggccgccgaggaaggtgcccacatcactgtccgtccttgcaacgttgccgacaaggccagcgttgaccagctcttcaacaccggtctcaagggtcttcctcctgttcgtggtgttattcacggtgccatggtccttcgcgatgttctctttgagaagatgacctacagtgactacacgtccgtcacggagtccaaggtgcaaggtgcatggaacttccaccacgccctccaagagcgcaagacagcccttgacttcttcatcgccatttcttctgctgctggagctgtcggcaaccgtgggcaagcagcttacgctgccgccaactgtttcctcaacgccttcgtccagcaccgtctgtccatgggtcttcccgccacttctctcgacctgactgccgtctccgacgctggttaccttgctgatagtggcgcggagcgtgcggcagaggtcgccaagaacctgggttccgacacgatttgcgaagctgaggtacttgcccttatcggtgcttccatctctggaaaaacctccgtctgcaaccaacacgtcattactggtatgcgcattactcctacagttcagcccttctggactcccgatgccaagttcaagtccctccgccttgctgcggaggagttggccgccgccgaggctggcgcaaacggtgccatctccctcaacgctgctctcaaggcctctcgcagcgaggctgaggccatggaggttgtctgccgcggcttggtggagaagatcgctgctgttctcatgatggagcaggacgatcttgacgtcacccgcagcttgtcgcactaccccctcgactctttggttgcgatcgagatccgcaacttcatcacgagggagttcgaggcaaatatgcaggtcttggagttgctttccagtggaagcatccagaccttgaccaaggctgtttgcaagaagagcaagctctgcgtcgggtttgattggagcagttag

SEQ ID NO: 364 - DNA, 771 bp, Colletotrichum orbiculare
atgcgctttctctgccttcccggtgcctacggcagctcggacaaattccaagtacagctcgctcccatcttgaaggaactcagtgaagacggcacggcaacatttcacttcattcatggaccctgcaaggcccttccgcctccgggctttgaggactactttggagccccgccctactaccgcttcatcgagcccgataaggatgtcgagaagacccagagcgacgacgttctcgctcgtatccgcgactttccgcaatgcgagacgtcagaggacaccatgagggagctcatgagggagggtattgcgacgactcatcgcagcaccgacagagccatcaagtacatcagcgacatcgtccagaagactggcccgtacgatggcatcatcggatactccgagggcgccaccgtggcttcgacattcatgctctatgagcagcgccgcctgcagcgttccggccagaagccggcgttcaaatttggcatcttctttgccgggtggccccctgtcgaccccaagactcacgctcttgtcctgtctgacgagactgacgagaggatcgaagcccgcaccatgcacattatcggatccttggacccttatgttgacggctctatggccctgtacaacatgtgcgatcccgatacggcctacctgttcgaccacgccaagggacacaccctcccgcgtgacaaggacactatcaaggaacttggcgacattgtgcgcgagacgaaggcagacatgcaggccgaaggtctgctgtaa

SEQ ID NO: 365 - DNA, 4047 bp, Colletotrichum orbiculare
atggccacgccggccggcggcgcttatgcggccgctccggcagcggccgacgaggcccctggggttgccaacgcccccagcgatcctgccgcgacgccgttagagcctcccagggcgtggtggaagctgagtgcaagcaatgtcgcgacgttgcgcaacttttgtaggatcctttcgtacggaacatggatggacaagctgatcatcatggcgtccgtgttgtttgccattggctctggactcaccatgccggtgatgaacattgtgtttggacaacttgtcggcacgtttaccggtttcttcaagcagggcacctcggagacgcggtccgacttcaccaagtcggtcaaccagggcgtcttgtacatggtctacctcttcatcgcgaggctcatcctgacctacctctccaacctcgggttccgcatgacgagcatccgcatttccgccgcgatccgcctgacgtacctccgctcgctcttcgagctgcccatctcgacgctcgacatgctggcgcccggccagacggcggccatcatcaccatcacggccagcatcctgcagctgggcatatcggaaaagatgggcgacttcttcaactcgctcgccgtcgtcatcgcgggcatgaccatcgccttcgcctacaactggctgctcaccctcatcacggcgtccggcctcgtcttcatcctcttcgtctacatcttcaccgcgccgcccatcctcaagcgcctctcggacgtccaggagatggacgtccaggccgcctccgtcgccaccgaggcctttggcgcgtacaggatgctggccgcgtgcggcgccgagttcaagatgctgcgcaagtacggcatcctcgccgaccagtcgaggaagaggggtgccggcatggcggtcctggtcggacttcaacaggggctgatctttttcgccatctatgcgacatttgcgctggccttttggtacgcgttcaagatgtacaccatgatgaccctgaccagcccggcctctctcatcgtcgtccttctctgcgtcatgatgatggcctcctccatcggccagctcacggcaccgctgtcggccgcgtcccaggcagccgacgccaacgccatcttccacaccatcatcgacgcccccaagcccgcgtacggcaagctcaaggccccccaggcgtccgccgagggcgacattgtcttccagaacgtcaactttgtctaccccaagcgccccgacgtcaagatcctcgagaacctgtcgctgcagttccccgccggcaaggtcacggccattgtcggcccgtcgggttccggcaagagcaccgtcgtcggtattctcgagagatggtatgagtttgacggcgatgcccagacgaaccagctcgtcctgtggctccgaaacggcatcatcagctgcggcggccgtcttctcagcgaaatcgaccccaagtggtggcgcaaccagatcggtctcgtccagcaggacaacgccctcttcaacacgagcatctttgagaacgtcgagcacggcctcatcggcaccgagtgggagcacgagacgtacgccgtcaagtccaagctcatcgagcaggcctgcaaggacgcctttgccgacgagttcatctctcggctccccgaaggctaccaaacccaggtcggcgacgccggcctcaagctcagcggcggccagcgccagcgcctcgccatcgcccgcgccatcgtcaagcagcccaagatcctcatcctcgacgaggccacgtcggccattgacgtgcgctccgagcagatcgtgcaggcggcgctcgaccgcgccagcaagggccgcaccaccatcgtcatcgcccaccgcctcggcaccatccgcaaggccgacaacatcatcctcctccgcaagggccaggtcgtccagcagggcacccaccagtcgctcatggaggacgtcgacgggccgtactacaccctcgccaccgcgcagaagctcgacatgggcgccgaggacgacgacggcgaggtcgacgacatcttgttcggggacctcagctggcgccgccaggagcccgaagagcgcagccccgtccgcaagtcgatgccctttgccgacagcgagggcgacctgacggagaagcggccgagcagcgacggcgaggcctctggcgacgcgcccgtgaccgaacgcgacggttccgacgaggagctcgagcggaccgaggccggcacgctgagggtcgtcaagaagcccgagggcgtgtatgcccgctggaaggcgtggcatctgtttggcagcttcgggcagctcctcgccgagcagaggaagcgctggaagacgtacattgtgattgccgtcggtgccctcggcgccggagccagcactcccgtccaggcctacctctttgccgtcctcgtctccctcttctcgtactggggcaccatcctgcaaacgattgcgaaccactggtgcatcatgttcgtctacctcgccgcaggggtcggcatcagccactacctcctcggctgggccaccaccaccatcggtttcggcatcacccgcgtctaccgcaaggagtacttccacaacatcctctacaagccctcggccttcttcgacaaggaggacaactccgccggcgccctcaccgcgcgcctcgccaccgaccccaccatgctgcagcagctcctcggcaccaacatggcctttgtcctaatctccctcttcaacgtcgtcggctgcgtcgtcgtcggcctcgtcttcggctggaagctcacgctcgtcgcgctgggcacctccatgcccatcatcgtcgccgccatgttctaccgcgtgcgccacgagacccggttcgaggaggcaaacaacgccgtctttgccgagagcgcccagttcgcctcggagagcatcggcgccatccgcaccgtgtcgagcttgaccatggaggacggcatctgccgccgctacgaggcgttgctgcagaaccacacgcgcgaggcctttcgcagctcgaggttctccgtgatgctgtttgcgtttagcgacagcatttctctgttgtgcatggcgttcgtcttgtggtacggtggacgtttgctgtctgaccacgagtatacgccgttccagtacatggtcgtctacatcgccgtcgtgcagggtggaatgtccgccggccaatggctcagcttcggacccaacatcgccaaggccaagaccgccgcggaccgcatcctcatgatgcgcgaacccgaagaggaagaaaccgcacccgcggccgacggccgcccctccgacgtcgtcccctacgaggtccaccacgaaaagggcgtcgagatcgacttcaaggacgtctggttctcctacccgacccggccgctgcccgtcctcaagggcctcgacctgcacatcgagcgcggccagttcgccgccatcgtcggcccctcgggctccggcaagacgacaatcatctccctgctcgagcgcttctacaacctctccgccggcgacatctcgtacaacggccgcgacgtcaacacgctcgagctcgcaaggtaccgccgggacatctccctcgtcgcgcaggagccgtccctcttcacgggttccgtccgcgacaacatcctcctcggcgtcgaggacgaggccgccgtctcggacgaggccctccaccgcgccgcccgcgacgccggcatccacgactttgtcggctccctgcccgacggctacaacacccaggtcggcacctcgggcgtcgccctctccggcggccagaagcagcgcgtctccatcgcccgcgccctcatccgccgcccgtcgctgctcctgctcgacgaggccacgagttccctcgacagcgagacggagcgcgccgtgcaggccgtctttgacgcgacaaagggcagcaggaccatggtcatggtcgcgcaccgcctggccacggtgcagaacgccgacgtgattttcgtcatggccgatggcaaggtcgtggagaagggagaccacgcgagtttgatcgcggagcggggtgtttatttccaaatgtgtcaatcacaagcgttggacaagtaa

SEQ ID NO: 366 - DNA, 2097 bp, Colletotrichum orbiculare
atgaacggcattcgcaaggccatctacacgtataggacctcgaccgagagcggcgtcgacgtcatcgtcaacaaggcttttgccgagagacggttcatgcttgatgtctttatgacgcctaagcctttgccatgcactcttcctaccgttccgctctcgcaactggctctacatactgggcaccgccctggatctcgaatgtggatcggagttcatggcagcgtctacgatgtcaccgacttctgccccatgcatccaggcggaacgctcatcatcaagtccaacgccggtgtcgattgttccaagtctttcgacaacctcgcccacaccaacaaccccgaagtgtccagtcttctgaccaagtactttgtaggccacctgacaccgaagccggactgtggcagcgacaacatctcggcgcttcactatctttggtcggcatatctccgtactaccgtcgagccactcgtcgcccatcagttcgagatgtacgagatcatgggggcctccctcgaaacgtcatcttcacatgaccccgcgggaagcaacaacatctggttgcgcgaaagccttcccaacatcattgccgttcgtactttctacagctaccagtcgcgtctgcttcagggcggttttgcagctctgttcgctcccaagcttcaagagctagttctcaagctctcctttggcgtcgccagtgccaacggaccggcagcagacacgaagctgccagacgttctcggcactgtcgcccgagccaagaccagcagcgacgctgcgatgtgcaccaaagaaatcgccctcgtgggccagtttgtgtgcgacgccgatgccactcttcgcttccaagaacgcggcgtctttgcttacgccgcacgaagcgtcgagcttgacgttgctttcctggaagaccttcgccaagaagcttgcaacggcatggacgcctttgatagcatcgcagcctcaatgaaggagtttcaggacccggacgtcgagaacacgcgcctcgcagccctctccacatttctcttgcaagtcctcgagcgcatagcccgtcacctagaggtcttttacgcccagctggcgcgttcctcggtctaccagccccagatcgagaagaatcccgcgcgcacacgctgggccctcgtccggcgacgtatccgagacggcagcctgttcgttcttgcgaccaaggctgagctctcgggggacctggtgcagcaaacgacgtattacatgtcgcgcgcgaacccgaaccagaacattgactttgaccgcgtcatggcgcaagtgcagactaatctccgtaccggcagccaagacgtttctcatctgcaagcgcagcagcagcggcctacgacactcaacgccgtgcaccaggcccgaggccgtagcacgggagccgtcagcgcgatcgcgagccgcgagaacgcgaacgctgtgagggccatgatgggcttcgtcgagaagaacggccgtgcaatccggcgtctgagtaagatgcccactggaatgaactttgaggatatccagagagcagcgctggagctggcacagggaaggtccatgtcgccgcccgaattgacgggtgacgtgctgtcagaatacaatctgaaaggcgcaaagacgggcagggctctgcccacgccaccgtcgagtcgaggatccagtcgctcccccacgcgattcggcccgctgggtgcgcacatgggtgggagaccgtctgccgagcagctcctttccaaacttaatcgaccaagaggtgcatctttgaccagagcgggcgccagctcactagcgccataccccgtcatcggccatgcctcacctccggtggatccgcagacggctctgagcacgatgatgagccgtctcaacacacggccgcgcagcgggtccgccaccatggctccgtctcagaataatctcacccaaagcggcgggttggcgaggacgagatcgttgatgagcgtggacagcaatggtggcagggatggaaggggccaccgcgtgccgcgagggtcgacgagttccttgcggactctgaagttgaggagcgtgatggaaagcgaggagagggtcgcgccgacattttag

SEQ ID NO: 367 - DNA, 2586 bp, Colletotrichum orbiculare
atgggtccccgaggatgctccttttctggcttttcccagccaggcgatgttcatgccgcctttgatatcccccgaggagtcgaagccgaggaatggcttcgcatgcgggaacgaaagtccatcaaccaggttctctattcgagctacccttctataccagaaatcgacgcagccaaggaccaggctcaaatggatgccttcaacgtcagcgagcaagatcttcttgccgttgcccttggggctccggcaagacaggtcatgctcagagcggaagaaatcggcccgcagaccggttggaaggactgctatctcagcatggaacacggcttttgcccgcccgactatgacgaggccgcaggtgccctggctagatcaccaggtcgtgtgtggtctgacctttgcgaacgcatgcccggctgcgtttcccgcggccgagtcagagaatccatcgccgctgcgcccaccatcgaaggcaccgaagatgtcataccagaccaagctctctgggctgctctcgtcgcgctggggatgctctgctccatctaccgctttgagcaaaagtacgacggccaggacggcgtcaatgcttcgacgaatccaacaaagctaaggctgacctgtaggatgggcgatcaccttggagaggagctgcttggcattcccctttccatcgcactgccttactttcaagtgtcccgccgcatgggaaggaccttgccccacctcacattcgttgatcaatcatcctacaatctcaagatcaaggacgccacatcgagctacccctatgtcgcacgcttcgataacatcgaactgaggtggcccatgttcggtgagagagccgaggttgccttcctgaagggtgttgcagagacgtcagcctccttccagcatggacctgacgccattgctgcctgccaggaacatgtaaggaaccgcaacgtcgagggcctccttcacgagatgatccgtctcaaggaaattctcgagcgcatgccgaacgcattccactcgatttctacgaaccccaacgctggcgagaactacgtgccggttcagcaatgggttcgctgggctaagttctctgcacctctttcgaagcgctgccctgcctcttcaggcctacaattccctccttacttggtcatggatgcctttttgggcagaaaaaagtatacatccttcctcggggctgagggcgttcacctccgagcctggcttccttccaacctgcgcgccttcatcgcggccatcgaataccattaccgagtgcccgagttcgtccaacaatccggcgacccaaggctgatgggcgttctcgacggcatcgtcgaggcttatactggcgaacgtggattcatgggggtacatcgctacaaggtctttggaatcctagaggtcgccgccaaaaccggtcgcaccgagaccaacggtgcctccggggcggctgacggagaacgcccttgggaagaaacacatcgccagttttccgaggccatgaaagaacggctagagccctatcgtggagcgctgccagtcgagcctcatcagatgcgaggcacgttcgaagaatgccgctacgttaccagagtgctgaacaggtcttttgtcgattctgatcccgcgcgctcaatagcgatggtgacgctcgatatccgcgatactggcattacatttgctcctggagaccgcttggccgtgatgcctctcaacaactgggaggagtgcgccaaggtaattgctgccctgggtctggaagggcacatcgacgcgcctgccagcgtcactggaacatgggctcgatttgagtcgcacctgggcttcgtgaggaggaccgcaacccccaagttgaccgttggcgatattttacgccgcggccatctagcgcccatcaccaaggacatggctctcaagatctacagcatgctacatgcctcgtctaacacagtgttgcaggacgccgtcacagatacgcctcctcagatctgggaccgcgtcttcaacctggatgacctgtcgtggctagcggagctcatcccaccggaggtaccacgaacctactcgatcgcaagttttaccgaagagcttctgccggagactgtggatctggcagtatcccggtcagagtataagctgtgttccacatttgccagaggccaggacatcacgcgagctggcgtctcgtcggggttcctcaccccgccggtggagatgagccagattgaatccgacgatgagatcctcattggcgtctcgcgcccagcagctggcatcgcgccatttcgcagtttctggcaggcccgtctcacgcagagtgggctctctggtgggaaaaaccagctgtacctcggcgtccagtctcgtgagaagttctgcttcgaagaggagcttcgacaatacgtggacgcggactttatggaagtgcatgtcgcattttccagggactcccgagggctggcctacgaaggccgggacctagtcgagaaacatatccctccccgctacatcgatacgctcatcgtcgaacaaggcgcttccatttgcgatcttgtaatgtccaagaagcagggtggtcaaggtggttaa

SEQ ID NO: 368 - DNA, 2691 bp, Hirsutella minnesotensis
atgccgtcgacgcaagatctactcgaccaatactcggaccaactggtgccgttttcattccacgccggcttcgtctgtttgagctatgccatcagtctcttggggaccggctcaactctcgagttgatgaggcggcgcacctctcaccggggacttcacaatctcttgctcctggttggtgcagccatctccatgggagggatcgccatctggtccatgcactttattggaaacagagcaatctatatttttgatggtcgagaggacatgcaaatctcatactcgactggcatgaccatcttgtcgcttcttgttccgattcttgttcttattctcgcgttccttgccgtcagcgttaatggccgaatccgttggtggcgtattggcattgcgggcttgctttcaggcggtgccatctgtgggatgcattatttggcagatgcctccattagcaacttccaaacgacatacgagatcggttatgtcgtcggtgccgccatcatcgccgtctccgcgagcacaacggctctcgctatcttcttcgtcttcgaagccgcatggaaagttctctggtggaagaggctaggatgtgccatggtactcgctggagccgtctccgggatgcattggtgcgccgctgttggtaccagctatagattaatccgtctgcagtctcttcgacagggaatgtcgcgacattccctgtcgatcatggtcatttgcttgtctgttgctgcttgtattgttcttacaatcagtggcatttactctagctggattcgccgcgactatgccagcaagtcacaaaaggtcgttttggccgccgccgtgttcgatgaggagggcagaattatggtcaaccaggaaggttttcttccaagcgaagtagtcacggacatgctcatgaccaagtcgcatagcgagatattcgacacatcgcatcctcttttccactggatgtatcgtgcttcccgaaactggccgagcatcgcgtccttgaccgacaagatggcaagccatattggccatgtggctcaagaccggtataatggacgagcacggcttaagttggtcaacgaagatggaacactagtacaacactatgatcagctcatctgcgagttgttctccctagccgctttggctctggcgaataagactaaggaggtactgacaagcgccggtacgttgtgggaagaaatctttgttacaggcaatacagcgaacaatgacgtcttttcgaagcttgacgactcgagccttgcggcaaaagcaggttttagtaagaacgccaaggctgttaaggataaatcagtttttgtcaacctggccgaaaaggggttgattcctatgcaccagcaatatggtcgtggttgcctcatgttcctcgtgcgccacatcaacgccaggaaggatctcgacaaactcgaggcggccggataccggtttgcagaggttcaccatgtcgtgggcaccattcgctcgagtatgcagattagcactccagactttgccacgcgactacgcagcatgtcagccaaccccaagcgcggcgccacgcttgcccccggcgtccatctcggcatctttgcggttcgagcgaggctagaccattgcggcttcgacgtcctcgttcagaaagacgccaagaatctcctgccgaccgccgagatacctttggaacgtcttgagccctggcaggttgacttcgtgaaccgtcttaggggccttggcccgttggccatcattgaaagactcaacagcgaccatcgcttatccccgcaagaggcccgcttggcttctcatctgcgaaacgccattgctactctgagatcgtctctcggtaatctggcgttcagtgatgccactctcatgtctcaagtggtacatgcaccttgcactactcgggaagaaaatcctcgcttgtcaacatgttcactcatttcgtttcgcatgattcttcccattcacagcgtggctcgtctcccacaatgcgagtttgttccgcttagcttcttccgggtccaacaacaggtgtacgcagaatcaccctatcaccttgagttcgcgcatatggtccatcgggacctttcatctttacttcacaacatcccgtcatcgacacctccaaagacgccgcagcggtcttccacgaggcgctcacccggatggatcaataggcttcggtccgagcgcagccctagcaaagtggttagcctccagctttctgccagaagtcaagaacgactgtcgactggtacttttaaccccatgtcaccatatcctcagagcgattccatgagtttcgacgactgccgcaagcctcaattcggaaatatcgcaccatctcccatgggtcacgtttcctgcatgcgggcgccatcgcctgtcaatagtagctccataaaccaggacaaacagctcttcggaggcatcatggtatcgcaacagatcatggtcgacgtacaagagcttccgaacgagcgtatcccttcaaacgcttcacgccctgaagatgtaggtagtcccgagacgcccgtctatcaggatgccaaagatcctccccgacaaggaaacgggttttcagctgttgctgtcggtgagaatggctccgcggcagccagggatcaaggaggtttgcgattcattgacgatttgctctcattgtgcatggaaagatccgagttttag

SEQ ID NO: 369 - DNA, 2277 bp, Hirsutella minnesotensis
atgaggatcttattcctctgcacagcgcacaactcgctgtcacagcgactgttcctagtcttgtcgcgcaatcattcagtgacaatcgaatatgcgctcaccgagtcgataatgattgaggccgtcaacctggccaacccgcacattgttctctgcccattcctcacgactcgagtgccgcgccagatatacgagcaatatctcacgttgattgtccatccagggcctccgggagatgctggtccgagtgctcttgattggctcttgatgggggacgatggtacagaggcggtctccgatagactactcaccaacgactcctttagctgcagtgggcgcagccactggggggtgacggtgctccaggccgtcaaggagtttgatgccgggcccatatgggcttttgaccagttcccggtcaacatcgacgagcccggactgacaaagtccagcctgtatcgtggtccggtcacacaggcagccgtcgcagcgacggcggcagcgatcgacaggatcgaggcagcggccctcgttagggccaccatcctcggggaatcggcttcgccacccagctcacccggatgcgatggccctccgagccggagccacaccttttacacgaatctactcacgcagcgggcttttggtcgattttgtgtgtcttcctctcagccattcaggggcggccagactcacaagaggccgctgctgcttgcaagccaaagaggcttcgatccccggaatcacgacgctgccgaaatctctcgcaggattcggagcagcgactcacaaccaggttgcctcagtgccatttttgggccaaagctttatctctacggcggccaggtagaagatgctgcgacctcggcagtcaatcccgccacctcaccggggcaaattgtcgccatccgcaacgaagccgtctgcatcgcaactcgcgatggtaaaggcgtctggatcacgcatatccgacgggtcaagaccaaggctgacgcagcgctatggcctaaagtcccagcaattcccggcctcgccgaggccggctatcgtacaaatgtcgacacgacggggatccttttgcccgacaatgctattcggagcctaccgaagcattggacacgagcaaaccatggcacatgccaggagatatgggttgacttcgcagctgagagctttggtgtcttggctcacgtccacttcgacttgtacaacggcgccatgagcacgcggcagtgtaggagactgtgcgaggctttggatcatatactgtcggtttcgaatcgcccggagagcaagacacggcgcctggctgccgtcgtgcttcaggggggtcggtcctatttcagcaacggaatccacctcaatgtcatcgagtcggcggccaatccgtccttagagtcgtggcacaacatcaatgccatcaacgacgtcgtcgagtacgtgcttggacactttccaagaagaggcgtcaagacagtcgccgcagtccgtggcaattgcgcggccggcggtgtagcactcgctgcagcgtgtgatgttgtgttggctggcgaacatgttgttattaacccagcttaccgcgccctgggcttgcatggatctgagtttcatagtctcacctacacggggcgatgcggcgcccaaggggccaaggcagctctgaggtcgatgttgccgctgagcgccgacgctgccgtgcggttgggactcgtcgatcatacagtgcccggatccgggactctgctggaagcggcgatgcggcatcgcatcaacaagctattcacttcaaatccaagtcaagtcgaagaggacagcatcggctgctggaaggataatgtaaatctttccatatcatctctggcacgagcacgtgccgcggagctggctgaaatggccatggacttttggagtgcacgagcgcaacgttatcaccgccgccggtatgactttgtgcgcaaatccaaggcaaagtctacacccctgaggttcgcatcgcatcgccgagaacagggcatgcttgacgaggaggaggaggacaagttcgactcgatcacattctttgaccaaatcgcgaagcaggatgccgttcaggacttatcgatgaagatgatgaatgtaatcagcagatactcacaagcaccagtggcagaggtacatgggacgtggcgacaaggtgaggcggttgctacgaaagcacttaatggaatggaaaagagtggcgttgcggcagatacatcgggctccttgttttcatgctattacccgcatgttttgtaa

SEQ ID NO: 370 - DNA, 759 bp, Hirsutella minnesotensis
atgaagtttctttgcttgcatgggtcttttggtagcgcagtgaactttcaagttcagttggcgcccttcgtcacagaggtggagagatctacccccggaaggtttagctggatagacggtttccatcgcgccgatccacccaaggggttcgaccagtactttggtagcccccctttgtacaagtttgtgggctacgacggtgtcatggccatcaatgaactggtcggccgactccagtccttcccggccagcaacgcacccgaagatactattcgacagcttgttcggggagacgatgtctactcgggagatgccgttcgaaggacggtcgacaggttactagacatcattcaggcagaccccgaaatcgagggaatcctgggttactcggaaggggccatgaccgcagctaccttgattctggaggagaagctgagatgggaaagtcaaggcgttccgcgcaggataaagtgcgcaattttctttgctggctggccgccggtccgcctcctcgagcagacggtggaaccaatgctggcggatgagagcgaggatctcatcgacgtccctacatgtcacattattggctgcaaagacccctacgtccacggcgcattggccctcttcaacatgtgtgatccagatacggcccaactattcgatcatggccaaggccatactctgccccgagacgagaagaccattagcgaattggcatgttatgtacagacgaccatagacaagtgtgtgcaagtttga

SEQ ID NO: 371 - DNA, 6756 bp, Hirsutella minnesotensis
atggcctccaaccatgggcaaaagcctgtccccattgccattgtcggcatgtcatgccgcctcccagggggaatttcgacactcgacgacttttggaccttgctttctcgagctcgatcaggctggggagagatccccaaggaccgcttcactgccgaggcatactaccacccaaacccgcaaaagaagggttgcttcaacacgaaaggaggttacttcttgaaccatgatccggccaactttgatgcccctttcttcaacatcacacggcaagaggccactgctatggaccctcaacagcgaatgctattagagtgttcgtacgaggctctcgagaatgccggcattgcaaaagaaggcatagctggcagcgacatgggtgttttcgtaggcggtggaccgtcagattatcaatacggcgccttccgcgacctcaacaccattccgatgttcgacgtgactggtaaccaccagtcaatcctgtcggggcgaatttcacattacttcgatcttcgaggaccgagcttctgcgtcgacacggcatgctcttccgggctgtacgctctccaccaggcggttcagagtctacgcgccggtgagtgtgaatcggccatcgtcggtgcctgccatctgcatcttcagccggagagatggattacaatgtccatgtctgggctcttcaacccggaaggaaagacctttgctttcgatcaccgagggaacgctggcttcgctcgaggtgagggcgtgggatgcctgatactgaagcccctggacaaggcgctcagggacaacgataagatcaagtcaattattgttcatactggcgccaaccaggacggcaagacagttggtctttcgacgcccagtggcgaagcacaagagcaactgattcgcgacgtttacgcaaaagccgggatcgacttcaatgataccgggttcattgaagcgcatggaacaggcaccaagattggagacccgatcgaggccagagttatccacaatgtcttcagtgaaggtaggacaaagcgacagcctctttatattggttctgtcaagaccaatgtcggccacctcgagaacgccagcggcatcatttctgtcatcaaggcagcgatgatgctcgagaagggattcatcctgcctaacacaaattacgagaagacgaacgagaacataccgctggatgagtggaacatgaaggttcctaccaccttgagatcatggccggcgcagaagaaatacatcagcgtcaacaactttggttttggaggttcaaacgcccactgcgtattgcaacgcccggctattgacttcgagtccattgtccaggagaaatcagatggcgtacacaagctcttcgtcttgtcaggccatggagaggaagccgcgaaagccagggctaagcagcttggaatctacgcagagcaacaccctgaggtcttccagaagcgtctggtccgagatctttcctatacattgtgtgaacgacgtagccacatgccgtggcgcattgccatcactgcgtcgtgttgcaatgaggtggtcgaagctctcaacggcatggatgcgaagccaagccgagcatccaagcccccaaagatcgcgttcgttttcacgggacagggtgcgcaatggcacgccatgggaaaagagctaatgggttcacacatcgtctttgccgacacgatgcgcgccgccgataattgcctgaagacgttgggcgcagatttctcactactcgaagagctcgccagggataaggacacctctctggtcaataaagctcatctcagccagccagcttgcacggccattcagttggccctggtcagactcttttcctcgtggggcatcgaaccccaggcggttgtaggccattcgagcggagaaattggtgcagccttcgcggctggcgcgctttcactcgaagacgcgatggccatcgcatacttccgaggccaagtcaccctgaagatgaaggcacgtcatcctgaccttcgcggctctatgcttgctgttggttccagccccaacgacgttcggaagaccatcaagaccatgaaccttgagggagctgcagtggcatgcgaaaattcaccaggttcaacgaccgtctcgggtcacaccgatgccattgacaagttggccgcagagctcgagtcacgaagcatattcaatcgcaagctttacgttgacgtcgcgtaccactcgacgcacatgaatcttgtcgctgaggattaccaccggtcaatcaatgcaatcaataccaaggacgaaaacaaagtcactttcttctcctcgttgcagggaaggaaactggagagttgctcgatgctcaccgcagactactggactgacaatctggtcaaacctgtcctgttctccccggccctcgaagctctttgtgccgaaactaagccttctgtattggtcgaaatcggccctcacgccgcgctcgaagggcccatcaagcagattttacgcgagatgggccagcaggcgagtcatgtcaagtactgccctagcctgaagcgaaaccagaatgccaccgaagctgccctcaaggccgcaggaagtctcttcgtcatgggtcagcctctggcatttgacgaggtcaacaatactctgcgtgaaggtgacgcaccaatagttcttgacgactttgcgaattacccctggacgtatgaaaggtattggattgagcctcgcatgaacctgggaactcgcattaagccatttgcacggcacgacctcctgggactgctcgagacttcgtcaaccgagaacgagcatagctggcggaacgtcataagcactgatgacattccctggttgaaagagcacaagatgcagtcgttgacgacattcccacttgctggatatatttccatggtcactgaagccgcatcccagcgtgcaaacctcaggcgtatagcattcgatcgattttgcatgcgcgaaatacaagcaaaagcccccttcatcatgaacgacggagacgagtacgagaccatcgttcatcttcgtcggtatgctgaaggcactcggtcgtattccactgagtgggatgagttcagcatctccacgtggatctctgagcgaggctgggtcgagcattgcagaggtctcgtggctgtgcgcaagaacaccgttaatcccatcagcctctcagttaactctggaagcgccaggcgtttgaccaaggccgagcagctttgtgtggacacgattcccctggatggcctgtacagtgaactcgataacaagggcgcgacatacggccccttgttccaggttcaaggtcaagattctcttaagtgctgtgacggcttcagcaatgtagaaattgcagttccggacaccgcttcggtgatgcactcccattacgagacgccatacatcatgcaacctgccttcttggatttgatcttccagcagacctgggccatcttgggagccggccgcaaccgcttgccgagcctttacatgcccaacgttgtcaaatgtctcgagttcagcaaagacttgccgaaccagaatggtgaggcgcttcgcgtggtctgcgagggccatcctgacttcaaaaccctcgcacctgtggatttctccattgatgcgtggcagtctcagggccgtgacgagcctattataagcatcaaaggtttcgtcatgtcacctgttcaagatcaagatatggatgatctgaccccggcatctatctgctataagattcagtgggaggatctcccagaggagagcaagttcggagtcagtgcaagcggcctcagcgtcaacggttcgaaagagcactccagtggcgcgaatggctatgccaacggtgtcaatggtcataccaaattgggtctcactaatggacatgtcaatggtgtcaatggccactcaaatggaatcaatggtactaacggccatgccgacggcgcgaatggccatgccaacggcgcgaatggccatgcgaatggccatgcgaatggctactccaacgggatcgctcacctggaggccgaccttccagctccagtggtgctcgtgaccgacaggagcgaaacagaccccgtcgtcaaggccctttcagatatctttgtcatgaggaccggagtaacgcccactgtgtgcccgttcagacgagtcatgcccgcagagaagatcatggttttccttaatgagcttgatcgtcccttccttgctggaatctccgtcgaagactttgacaaactgcagcgcgtcattctcacgtcaacggctatgctgtgggttaccaagggtatgttcaaggatgcgcaacagcccgagaacgctctgtcccaaggtctcctccggactgtgcgatcggagacgggcaagctcactgcgagcttggacttggatcctcgatcgaagcttgacaaccacgctcgctctgagcttattgtcaaagtcgtgagcaaggtcatgtcatccgatgaagcaaatggtcccagcgattttgagttcgccgaggacaaaggcaagttggtggttcctcgcgtggtggcagactccggcatgaatcaggccgtgcagaggcgcgtccgaagtactggccagtacatgcaaccgtttgaccaaggcgaccgtcgtctggagattgcgattggcacatacggggctctcgactccctctatttccgggaccaggttgttcaaccgctcgaggatgaccaagtcgagatcaaagttacagccactggcatgaacttcaaggatgtggtcattgccatgggacaagtcgccagcagctacctcggtgtcgagtgcagcggcattgtctcccaagtggggagtaaagtcacgacgctctcggtaggcgatcgcgtctgcgctatgtctctgggcgcgtacggaacatatgcgcggtgcaaagagagcagcgctgccgtcgtaccggacgacatggcactcgaagtggccgcctcggtgcccgtggtcttcagcacggcctactatggcatggttgaacttgcccatattcagcctggcgagagcattctcatccacgctgcgtccggtggtgttggacaagcagccattcaacttgctcaaatgctaggcgccgagatttacgcaaccgtcggaagcattgacaagaagaagctgattatggacaagtataaaattcccgaggatcacatcttttacagccgcaatgcaggttttggaccggccattcgtgaagccaccggaggcagaggcgttgatgtcgttcttaactcactcgccggcgagcttttgcgcgagtcctgggaaagccttgcccactttggacgtttcattgagattggcaagcgagatattacgtccaacaccaggctggacatgagtcagtttgagcacaacgtgacgttcagctcagtcgatttgacgctcgtcgccaaagagagaccccaagttatgggccgtgtgctcaagcgggtgatggagcttcttggtagcaagaatatttccgttatcgagccaatcacagtcttgggtatcaccgaactcgaatcggccctgcgtacgttgcagggcggcaagtccacgggaaagatcattatagctccgcgtcccggagagcaagtcaaggcaactcacccacaggaaaaggagatattggttggtaatgccacctatgtcattattggtggtactggaggattgggccgatccatggccaaatggatggtacgacgcggggccaggtcaattgtgctcctgtcgagaagtggtaaagtcacgcctgagttggcacgtcttgtcgaagactgccgagggcagggcgcgacgatcaccatcaagtcctgcgatgtggccaaggaagcaagcgtcaaagaccttgtcgaggactgcggtcggaggatgccaccgatccgcggtatcatacatgcagcgatggttttgcgagacatgctctttgagaaaatgacacacggcgacttcgatcaagtaatcgaggccaaggtgtctggcacatggaacttccatcgagccttggcctctcatcagctcgacttctttgtcgtattgtcgtcggtagctggcatcgtcggaaacagaggccaagcggcatatgcagcggcaaacacattcctggacgcgtttgtccaatacagggttcaacaaggtctgccggctacttcaatcgacctgaccgcagtcgaggacgtcggatacttggcagaaaatgccgagcgtcaaaaccaaattctgcagaatctagctggtagctcttttggcgaggcagaggtccttgccttggttgagcttggcatatctggcgatatctcgcgactctgcaacagccaatgcgtcacgggtctgaactttagtggtgcgtcgttgccgtactacggggaagacgccaggttcctccatctccgcaacgccgttctcgcgacgagtcaaagtgccgatggaatcgacgaatcaggcaagtccaaccaacaggaacttgccagtgccgagacgtacgaaaaggccaacgagtttgtctcgcaacgcgtttgggagaagctgtgcggcatattgatgttgcagcccagcgatctggacccggccagcgaagtcaagtcctatgggctcgactccctgaacgccattgagcttcgaaattggatcggcaaggaatattcggcgcacttgcaagttctcgagcttctcacgtccggaactatcggtgatctggcggccctggttcttaaaaagaccaagatcaaacatccggaaaaggcctcttag

SEQ ID NO: 372 - DNA, 1974 bp, Hirsutella minnesotensis
atgctaacagcgggctcgaatgccagggccttcctagactctcttgatccgtcaaagaaatacgattatgttattgttggttccggggctggaggtgggccgctggctgcgcggctggcaacttacggtcacagcgtcctgctcgtcgatgcaggcgacgatcaaacagacacttatcaatatcaagtaccatctctgaacttgcaggccacggagtacacgccgatgacatgggcattcttcgtcaaccattataacgacccgcagagacaacagcaggataccaaaatgacatggtatactccatctggagaattatatgtcggcaatagtccgccgcagggttcaaccccgtacggaattctatatccgcgagctggaacctttggcggctgtacagctcacaatgcccagattatcgtcttgcccgatgaaggtgactggcagaccatcgtcgatatgaccggagacaagagctgggcgccacataagatgaagaagtactttacgaggctcgagcgaaatcggtatttacctgcgtcacacaagggtcacggctactcaggctggcttacgacaagcgttaccaatctgctcctcgttattccggatcttaaaatcactagcattattctcggtgccgcagcctccgtcggccaaggacttggcaagctagtgactactgcaaaggggttacagcatatatttcttctcgatttgaactcgggcgtgtctgatcgagatcgacggacgggactctttcaaatgccgttgtcaatcaagaatggatatcgctccggcccccgggacttcatcatgcaagtcttagaggaaacggactcagagggccagccgaagcatcaacttgacattcttcttagtgcctttgttaccaaggtcatatttcagaacgccggttatggaaaaccacgagctatcggtgtggagtacgcgaggggtgaaagcatctatcgggctgacccacgagcttccagaaaccggaatcggcctctaagaccaacgggcaatatcactgcgcagcgagaagtgattttgtcaggcggggcgtttaatactccccaaatcctcaagcttagtggtatcggtccggctaccgaattgcaaagatttaacattcccgttgtaaagaatctcccaggagttggaactaatatgcaagatcgatatgaaacgacagtcatcggaaaagctccggaagactttaagttgactaagaagtgcacatggatgaggtccgtccctgacccttgcctagaggattggaagaagaacaagcccatcccacttcgaggcggttacacgaccagcggaatcactctcgctcttcttaagcgctcttccgtctctgcagacgcaacgccggatttgttccttgcaggcgcgccgaccgcgtttacaggttatcaccttgggtattctgatggcggcgtcaaggacgcgctacattggacgtggattgttctcaaagcacacacgagaaactcggctggcaccgtgttgcttcgtaccagggacccgcgggatactccaatcattaccttcaactcctttgacactggaacaaatgacgctcgcgaggcttcgcttgactcgaaggctatggtcgagggcatgctcatggctcgccaagctattaaggatatcccgcatattaagaaaccttttaaagagtcttggcctgcgtctaaagtcaataactcagaacagatgaaggcttgggtcgagcaagaggcttgggggcatcacgcgtcatgcacctgcccaataggaggcgacaacgacccaatggcagtattggactctagcttccgggtgcggggagtcgacggccttcgggtcgttgacgccagtatcttcccaaagattccgggatattttattgtcctgccgatttacatgatttctgagaaggcagctgacgtgatccacgcggacgcgaagagggacaggtaa

SEQ ID NO: 373 - DNA, 678 bp, Mycosphaerella populorum
atggcggcgcgacagagtgcgatgaggcccggcggtggcggtgcgcgctttgcacagtttaagctggtgctcttgggggagtcggctgtgggcaagagttcgctcgtgctgcgattcgtcaaggatcaatttgacgactaccgggaatcgaccatcggcgccgccttcctcacgcaaacaattgcactcgacgagcagactacagtcaagtttgagatttgggacacagcgggacaggagcggtacaagtcgttggcgcccatgtactaccgcaacgccaactgcgctgtagtagtatacgacatcacacaggcagcatcactggacaaggccaaggcgtgggtcaaggagctacaacgacaagcaaacgagaacatcatcatcgcgctcgcaggcaacaaggcagatctggttgccgagcagcctgataaacgtgcagtctcaaccgcagacgcggaagcatatgccaaggaagccaaccttttgttcttcgagacgagtgcaaagacggcagagaacgtcaaggagctatttactgccattgccaagaaactgcctatagagcaggccactcaacgtggcatgaggggtgctgctggaagaccgggcggtgtggaccttggatcaaggcaggacccgggagcatctgctggaggcgcaggggcgtgcaactgctag

SEQ ID NO: 374 - DNA, 2091 bp, Mycosphaerella populorum
atgagtgccacgctgcccttccgcgacatcaatgtacacgcgtcgtcaacctactacgccttttcctcgccctcttcaccgaatgcgccaaccctagtggtcgatcggccatccggagacattcgtctgcacgatggcaaagtcactggaggccaccgcgtttccagcatctctggcatcctcggaatcatcaagctgcgattagatagctatattatagtcatcaccaagtcgcaggccgagggccgattgaaaggacatcaaatttacaaggtcatatccacggagttcctgccattgcgtgaacgccaagtccacgacccggacgaggacacgtatcttgcctacctcaaggctcttctgaagaatggacccatgtacttctcctactccttcgacctcaccaacagcttccagcgacaagcccgccttgatgcaaacgagcccctgtggcaacgtgccgacgatcgcttcttttggaatcgtttcatctctacctctctcatcaatctgcgccagggcaagacagctagccgggtgtcacctggccctcagcctgccgccgatccatatatattgcctgtcatgtatgggatgatgcgcatcaccaacacgtccatcaaaggtaaccccctcacgtttgtactcgtcactcgacgatcacgatttcgcacgggaactcggtacctgtcccggggcattgacgaagacggtcatgtatccaactacaacgagacagaacaagctgttattctcaatgacaccctatctggcggcatgaccagctatgcgggagatcgtggcgtcactagtggagcacccgggagtggctcggagacgcaggtattgtcttatgtccagacacgaggcagtgtgccagtttactgggctgaaatcaactctctcaaatacactcccaaacttcagatccgcggagtcgaaactgctgtgaatgccgcaaagaagcattttgatgaacaaatacaactctatggcgagaactacatggtaaatttggtgaaccagaaaggccgagaaatgcgggtaaaggatgcctatgaacaacttgttaagattctccagtcaaacccaacggagcacacagaagcagatcacagaactcgggtgaagtttgatgtaatcgagcctgacgatcaacggagctggtacgatcacttgcactacgtctatttcgacttccacaacgagaccaagggcctcaagtggcaccgagcacagcttcttctggaccaactggccgacgggctgactgctggcggctattttcatggtatcgatcgaccgtctgggggtgttgatgtccgacggaagcagaccgcggtagtgcgcacgaactgtatggactgtcttgacaggacaaacgtcgtgcaatccatgcttgggcgatggactctcacacgaatgctgatagatcttggcgtgttgcggcctggcgagactgcgcaagacgaccagacgttcgaagatatcttccgcaacgtatgggcagacaatgccgatgtggtttccaaaacctactccggcactggcgcgctcaagactgattttacacgaacaggaaacaggacacgggcaggcatgctacaggatctgaggaacagctgtacacgatatgtgcgcaacaactttgcagatggtcctcgacaagatgcttttgatctcttcttgggtcactattctcccgacaccactggcattggatcactgcagcagtttgcagacaggagacccttggtcatccaagcagtcccatatgtgctcggtttctgtgtcttcttcgttgccgtcagtgtgagcaccaatcggcttcccaactccacggtgtggcctctccgactatttacgctgttcagtttggctgtagcaggttactcgggccgcttcatgtggaaccatgggacactatatgtcaattggccgaaactgaatacacctcaatgggcagtcgaggcttaccaagacacattggaaaaggtcacgaaagatcccctcttgggcgctttcattgctgggggcaatcgtgatgctcgtctaggcacattggaagagggcaagaagcgtcgcgagtaa

SEQ ID NO: 375 - DNA, 204 bp, Mycosphaerella populorum
atgacccacacccgtatggagatttctggcgtgaagatgcacatgcgaatccgtaagcctgaaggcaaatgtcacgagaaatcccacgtgcgaatgtgtcgacttgccaactccgcgttccggttgataggggatcactcaccatgtcgtgtatcagacacagtgatcagacccctcctccgagctgctgcttctgctttctga

SEQ ID NO: 376 - DNA, 804 bp, Mycosphaerella populorum
atgggtacagttgaggccgcacacgtgccattccgcctggatggcaagatcgccctggtgactggctccgggcgaggtattggagcctcgattgcggtcgagctcgctcgccaaggagccaaggtggtggtgaactactctcgagcagcaggaccagccgaaaaagtcgtgcaagagatcaaagccctcggctccgacgccatcgccatcaaagccgacgtcagcaacgtgaacgacaccgtgcgtctcttcgaagaagcagtcgcccactttggaaaactcgacattgtcagctccaacgcaggagtagtttccttcggccacttggaagaagtcactccagaagaattcgaccgcgtgttcaacatcaacactcgaggacaattcttcgtcgctcgcgaaggctacaagcatctcaacaatggtggtcgcattatcttgaccagctctaacactgctcgaggtttcgtggtgcccaagcatgctatctactcgggctccaagggctccattgagtcgtttgtgcccgtcttggccaaggactgcgggagcaaacaaatcactgtcaacgctgtcgctcccggtggtacagtcacggatatgtttcacgatgtggctcatcattacattcctggtggagagaagatgaccattgagcagttgaaggaggccgctgcctatgcctctccactccaccgatgtggctaccctctggatgtcgctcacgccgtgtgtttcctcgcgagcaaagaggcggaatggatcaacggaaaagtgctgccggtggatggtggtgctgcttga

SEQ ID NO: 377 - DNA, 543 bp, Mycosphaerella populorum
atgagtgattgttcttcgctgactgagcttgcagatgtcatgggctgccaggccgcgttgtttgaatgggcagacagctacgatgcgaaggattgggcacgactgcgcgaatgcgtagcaccaagcctcatggtcgactaccgggcgttcctcaacaagaagtgggatgacatgccggcggacgagtttgtgcagatggcgtccgactctcatttcctgggcaacaagacgatcaagacacagcattttcacggcggcagtcgatatgagcaggagtcggacgacaagatcatcggacaccaccagatgcgcgtggcacaccaaaagtacgccgacgagtccctgcagacggtggtcgccaaaggccatggccacggcacggcgaccatttggtacaagaaggtggacggcgtgtggaagtttgccggtttgattcccaacacgcgatggacagaatatgatttccacaagatttttggcggtcatcacgacgctgatgctgagagcggtggcgagtcttcaggaaccgcatcgccggcgtag

SEQ ID NO: 378 - DNA, 5364 bp, Mycosphaerella populorum
atggaaatcatttatttcagcaacgagttcccccgtgatgacctgcagggtgtgctgcgcaagttgcacaaccattccaaagaccgtcgtcacaccgtcttggcgcagttcatcgcagacgctactcgtagcgtcaaggaggaaatccgaactcttcccaaggccctcaaggcctgcttcaagcccttctcgactctattccaatgggccgaggatacggagctgcgcgaagggcccttgaatggcgccgtggacggtgtgctgctgtccgtactccagctggccacgtacattggatatgcagaagagcacccggacgaactcttcaacttcggcaacacgtgcttgaccggtctcggtctaggcctgatctcgtccactgccgtcgctctctcgccgaccttggccgaacttccccttgctggtgccgatgcggtgcgtctggcgttccgtatgggcatcctcgtcaccgacatctccgctgatctcgaggcgcgagtggaaggcgagtcaccagactcgtgggcttatgtcgtccacaacgtcgagcccgacgaggcccaacatcaacttgacctgttcaacttcaaggaacgtctcccagagacgggcaagatctccctgagcgcatacagccgcacatccgtcactgtcagcggcccaccggcccgactcaaggaactcttcaagaagtcgcagtactatcgcgatgcccgatccatcgctctgcccgtgtttggcggtctctgccacgctcctcacatctacgaccgcagccatgctcagcgtattgtgcgagaagcgacgttgaactgcaacgagggcaagcgattgcttcccatgactcccgtctactgcacaagcaccggcaagccatacgtcgcacaagatgcgctcgagctgctcgagaatgtcatcctggagcctctgacccagcccatcatctgggaccatgtcatcagtggcatcgtggatcgtgccaccgccacctgcgcccagacctgcaccatctacagctttggcccatccatcccgctcaaggagctgacggagagtatgggcgcgcgcattaccgaattcaacaccgactctgtcaacatcatgggatggatcaacgagagcactcccgatgagctcaactcccgtggcagcgcccaagcaaagctggccattgtgggcatgtcgtgcagactccccggcggtgctaccagcaccgaaaagttttgggaagttctggagaaaggactcgatgtttctcggaagattcccgccgatcgcttcgacatcgacacgcactacgaccctactggtaaacagctcaacaagagcatgacccagtacatgtgcgcgattgatgagcccggcctctttgatgccccattcttcaacatgtccccacgcgaggcgcaagtcgtggaccctcagatgcggttggcacttgtcactgcgtacgaagccctcgagcgtgcgggctatgtggccaaccgtactgcttcgacgctgctgcagcgcatcggcacctggtacggacaagccgccgacgactaccgagaagtgaaccaaggtcaagaggtcagcacctactacattccaggaggctgccgagcatttggtcccggacgtatcaactactacttcaagtttgcagggcccagctattccgtcgacactgcttgttcctctggattggctgccattgaagttgcctgccaggctctgtggaatggcgaggtcgacaccgcagtgaccggcggcatgaacatcttgaccaaccccgatggtttcgctggtctcaattgcggccacttcctcaccaagacccacaacgcatgcaagacctgggatgctactgctgatggctactgccgagcagacggcattggctctctggtcatcaagagactcgaagacgccgaggccgacaacgacaacatcttgggtgtcatcctcggcgctggaaccaaccactctgcggaagcagtctccatcacccaccctcatgccggccaccaagcctatctggcccgacaggtccttcgacaagcaggtgtggaccctcttgatgtatcgtacgtcgagcttcacggaacgggcacccaggcaggagaccacgaggagatgcaaggcatcatggaagtctatgcgccactctctggccgtcgctccaagaaccagcccttgtacattggcgcgtccaaggcgaacgtgggtcacggagagtctgtcgccggcaccacagcactcatcaagaccctgctcatgctccaaaagaatgccattccacctcatgtgggtatcaagactgagatcaaccccaggtttccaaaggatttcgacaagcgcaacctccacatcgctttcgagaagactacctggccacagcaccctggtaagaagcgaatcgctgccatcaacaactttggtgctgcgggaggcaacaccacgatggtattggaggaggctccagctcgtgtgcctgcggaggccgacacccgccagctgcatgttgtagctgtgtcggccaagaacaagacatctctggctggaaatctcgaaaggctccaggcctggatcgaaaacaacccagaagtgagccttgccgacctgtcgtacacgacgaccgctagacgccagcaccacaaccaccgtgtggccattgccgccactgacctcaagggtctccaaaaagagctcgcaaagaagctggcagccgccgactcacaccaaccaatccccaagtcgggcgcgccaccagtggccttctgcttcacagggcaaggtgctgcgtacaagtccatggacttggagctgtaccgtgaagtcccatcattcaggtccgacttcaaccacttcgactctcttgcacaacgtcaaggcttcccttccatcatccctgcggtcgatggatctttccccaaggaacacgcacactctcctgtcgtcacgcagctttcgcaagtgtgcatgcagatggcactggccaagtactgggcatctttggggatcaagcccgatatggtattgggccacagcctcggcgagtatgccgccatgtatgtggcgggcgtcttgtctgccaacgacaccatctatctcgttggtaagcgggcgcaactgctggaagcgaacgctcgtgtcggcagccaccaaatgatggccgtgcgtgcgtctctcgcacagatcaaagaagcggatggtggcctgcagtacgaggtggcttgcgtcaacggtccttcagacaccgtgctgagcggtaccgtcgagcagatggatgctgtatcggcacctttgggtgcggcaggctacaaatgcatcaagctcgacgtcgccttcgccttccactctgcgcagatggaccccatcctggacgagttcgaggagattgcaaggaccggtgttgttttcaaggagcccatcgtgcctgtcatctcgcctctccacggcaaggtgattttcgatggcaagacattgaacgccaaatactgccgtgatgccacccgcggcactgtcaacttcttgggtgcgctggagagtgcccaagaaatctccaccatcacggaggacacggtctacgtcgagatcggcgctcaccccgtctgctgcagcttcgtcaagtccagcattccagccctcaacttggctgtcccatcattccgccgcggcgagagcaactggacaacgattgcgcaggcatgtactgcaattcacctcgctggcctcgacgtcgactggaactcctaccacgctccattggagaagagcctaacgctgctggacctgcccacatatgcctggaatgaaaagacgtactggctccagtacaacggcgattgggcgctcaccaaaggtaacaccttctacactgccgagaaggaggccgccgcaaaggccgcagccgctactgggtcggtgcgttccaacgccgccagccccatcaagacatccactgtccagaacatcatcgaagagcacttccaggacgtggctggtaccgttgttatggagtccgatttgatgcaggccgacttcctcgccgcggctcatggccacaagatgaacggatgtggtgtggtgacatcgtccatccatgccgacattgcatacactctcggagagtacttctacaagaagctcaacaagaaagccaaaaaggtggacatgaatgtggccaacttgtatgtcagcaaaggcttggtggccaatgccaacaccaagaacccacagtgtattcgcgtcactgtgactacagaggacatccgcaccaacgtcgccaacctgtattggcagaacgtggatgcagatggtaacgcggcggatgtgttcgcggaggcgaatctcgtctttggtgatgccaccgagtggctcagcacatgggcacccatgacccatttggtgcaaggccgtatcgatgccctcgatgctcaagcgagggcaggtaaggcgactcgtctgtcacacaacatggcctacacgctcttcggcaagaaccttgtggactaccaccacaagtaccgtggcatgcaagccgtgacgatgaatgagctcgaagcttacgccgacgtggagctcaccaccgagaagggtggcgtatggactgttcccccatactttattgacagcgttgctcatcttgctggcttcatcatgaactgctccgacgccatcgacacgcagaacaactactgcgtcactcccggctggaaggcgatgcagtttgcgaagccacttactcccggtgccaagtactgctcgtacgtgaagatgatcccgaccgtcgaggacccgaccgtctatttcggcgatgtgtacatccttcaagacggcgtcatcgtgggcatggttggcggcatccagttccgtcgcttcccaagaatattgctgaacaaattcttctctccaccggacaagtctgagcccatctctgcaaacaagagcgctgctccactacccaagcctgccgcacttcctgttgcagcgcctgtcagcaagccaacacccagtgcgccagctgcgccaccgatggtacgagttgactcgggcactggttcagagccagaaaagaccaaggaggctgcgccagcgccagcaccagcaccagcaccagcagtggagactgctgccgacaccgctaccgacacctcttctgtcacatacaaggcgctcgagctcatcgccaacgaggccgcgctcgaaatatccgacctcgaagatgacgttagctttgctgctctgggcattgactctctcatgtcgctggtgatatcggaaaagttccgcagcgagctcgatatcaaggtcggtggaagcatgttcttggattacccaaccattggagacctcaaggcgtacaccgatacgttgtaa

SEQ ID NO: 379 - DNA, 1011 bp, Mycosphaerella populorum
atggaggacgacaagggaggctaccgccaaatcaacaagtcgttgaacatttgcgcgtttgaggactatctgcagggtcaaacagcgcgtctgccgcagttggccgatgtcgagcaattgacgccgcgggtgcttcgcattttgggtcagaaccccggacgattcaccttccagggcaccaacacatatgtgatcggaacgggccatacacggctcctcatcgacacgggcggcggcgaaccggagtgggccgaattgatcgccaagacactcgagtccatggacattaagctttcgcatgtgcttctcacgcactggcacggcgatcacaccggcggcgttccgaatctcctccttcgctacccggacctccacgacgccatttacaaacacactcccgacccgggccaacaacccatccttcactcgcagcgcttctgcgtgcaaggcgctaccgtccgcgccgtgcacacgcccggccattcggaagatcacgtgtgttttgtgctcgaggaagagaatgccatgtttacgggcgataacgtcttgggaacgggcaccagcgccgtcgaagatttgggcatttttatggattctttgcacattatgcgcgatcaaaactgccaagtcggtcattccgctcatggcgctgtcattcaagatttaccggccaaattgaaccaggaaattgcgggcaaattgcgtcgtgaacgacaggtgttgcagacgttgaataaagtcaagacttcgggtgaaaagagtgtcacggtcaaggatttggtcttgaaaatgtatggtgacaatgtcgatccggccacgagggaattggccttggagccgttcatggatgaggtgttgcgcaagttggccggtgatggcaaggttgcctttgagaaacgggcgggtatcaagaagtggttttcgttggctaagcctgctcaggctgctgctactccacaccctgctaaggctggcggtttgaagcctttgactgctattcgcgcttgttag

SEQ ID NO: 380 - DNA, 807 bp, Mycosphaerella populorum
atggcagaatccgctcctgtcgatggcttgtccacgcccagaattaccactttcgccatcatgggctgcacgggaaacacgggcactgccatcattcagcatttgctcgacacacccaatgtcaagattaacgcctactgtcgaaacaaggccaagctgttcaacgccatgcctgccacgagggagaacaagaaggtcgaggtgttcgaaggcagtattcaggacgtggacctgctggcccgttgtatgcagggagcaagagcggtcttccttctcgccagcacaaacgacaatgtccccggatgtcgcatcagccaggacctctctctggcgacagtgacggcactgaaaaagctcaaagcagattctgactccttccagcctcccaagctggtgttactgtcttccgccaccgtcgacgactacctcagccgcaaaattccctacttccggcccatcatgctccgcgccgcttcgaacgtgtacgaggatctgcgacgcaccgagacgtttctgcgagcgcaggaagattggctgacgaccatttacatcaaaccgggaggcttatccaaggacattggaagaggtcacaagctcactttgcacgacgaagagaccttcctctcctacgtggatctggcggcgggcatgattgaagccgcgagcgacacttccgatcagtgggatgggaaaaatgtgggcgtcatcaatgcgggcagaaaggccaagtttgaaaggagtacaccagcgaccatcttttttggcctcattcgccactatttccccttcttgcacccatatcttcca

SEQ ID NO: 381 - DNA, 4395 bp, Pseudogymnoascus pannorum
atggcgcccagtgccgtctctcccacgccggcctcccccgccgaggcatccacacacctcgccgaggtgaccgccttctacgacacaaccctgcggtttttcctcaacggtactcgcgttaacctcgacaatatcgaccccgagattaccctcctcgagtacctccgcggcatcgggctcaccggcaccaagcttggctgctctgaaggcggctgtggcgcgtgcaccgttgtcgttagccagtggaatcccaccaccaagaagatctaccacgccagcgttaatgcgtgtctggcaccgctcgtgagtgtggatggcaaacatgtcattacagtggagggaatcggaaatgtagaaaagccacatagtgtgcaggagcgcattgcgaaggggaatggaagtcagtgcgggttctgcacgccgggtattgtgatgagtctctacgcgctgctgcggaacgaagatcaacccactgagcattccatcgaggaagcctttgacggtaacctatgtcgatgcacagggtataggcctatcctggaagcggcgcgtacattcagcgctgagactggttgtgcgaaggccaagaccaacggcggtggaggatgctgcatggagaaggaaggaggtggcggctgctgccagagcaagcccgcagacgacgaccagccgataaagcgtttcacgccgcctgggttcatcgagtacaaccctgacactcaactcatcttcccacctgcactcaccaaatacgagttcaagccgttgacgttcggaaacaagcggaagcgctggtaccgccccgtcactgttgaccaactgctgcgtatcaagaacgcgatgccgtcagccaagattattggtggcagcagtgagactcagatcgagatcaagtttaaggctatgcaatactcggcatccgtatttgttggggatatcccggaactgcgcaagtttgagttccacgacgaccacctagagattggaggcaacatcacgctgacggatctggaagccattacgctgaaggctgttgagcactatggcccagataagggacaggtgtttacgaatatgcataggcaacttcagttctttgccggaaggcagattaggaatgttgggacgccggcgggtaatctggcgacggctagtccgatcagtgatctgaacccggtgcttgtcgctgcaaatgccacattggtggcgaagacgcttgaagaaactacggatatccccatgacggagtttttcaagtcatatcgtactactgcactcccagcgggggcgatcatcgctagtcttcggattcctgtcacggcgacgaacgagtataccagcgcgtataagcaggcgaagaggaaggatgatgatattgccatcgtcactgctgccctgcgagtaaaactcagcgagaaccacgatgtagagagtgtcaacctcgtctacggtggaatggctcccctcaccatctcagcgaagaaagcagacgctttcctcgttggcaagaagtggaccgatccggccacgctcgaaggcgtcatgggtgctctcgaacaagacttcgatctcaagttcggcgtccccggtggcatggccacctaccgcaagaccctcgcactcagcttcttctaccgcttctatcacgaggtgctcatcaagctcggtgataaagccgcggatcttgaggccgttggcgagattgagcgtgagatctcccgcggcgagcaggaccacgacgccactgctgcgtatgagaaaatgattatgggtcgcgcgcaaccgcacgttgctgcgctgaagcaatgtacgggacaagcgcagtacacggatgatatcccggtgcagaggaacgagctgtacggatgtctggttctttcgaccaaggcgagggcgaagctcatatccgttgatacatcagcggcgctggagttaccaggtgtagtagattacctcgaccatacagatatgccgagtccagaggcaaattggtggggtgcccccgtaagggatgaggtattctttgctgtgaatgaagtcttcacttgtggtcagcctattggtgtcattctcgccagtacagcaaacgaggctgctgcaggtgcgagagcagtcaagatccagtatgaagaactgcctgctatatacaccattgaggaggctatcgagaaggagagttactttgagcagtttcggttcattaagactggagatacagagaaggcgttcgcggaagcggaccatgtaatctcaggcacaacgaggatgggaggccaggagcatttttaccttgaaaccaatgcttgcgttgctattccgaagcccgaagatggtgagatggaggtgtttgcttgtacgcaaaaccccacagagacgcaagcatatgctgcgcaagtctgcggtgttgccaacaacaaggtcgtctgccgagtcaagcgtctcggaggtggctttggtggcaaggaaactcgttcagtgcagctgagctctatcatggcgctcgcggcgaagaaaacaggccgcccagtgcgctgcatgctcaaccgcgacgaggacatgatgacaagcggccagcgccaccccttcctcacgaaatggaagattgccatcaacagcgatggcaagcttcaggccctcgatgccgaggtagtctgcaacggaggctggactcaagatctcagcggtgcagtctgcgagcgcgcactctcccacattgatggctgctacgctatcccgaacgtccacgttcgtggccgtattgcacgcactaacaccatgtccaactctgctttccgcggcttcggtggaccccaaggtctcttcgttgcagaaacatatatggaagaggcggcggaccgacttggaatcccagcagagaagctgcgcgagatcaacctctacaagcccatggagatcacgcacttcaaccaggctctgcaggactggcatatccctctcatgtacgaccaagttcgcaagaattccaagtacgaggagcgccgcgtcgctgtggatgagttcaatgccacccacaagtggcgtaagcgtggacttgccattgtcccaactaaattcggtatctcattcaccgcactcttcctcaatcaggctggtgccctcgtacacatctaccacgacggttcggtgctgctcgcccacggtggcactgaaatgggacagggcctgcacaccaagatgtgcatgattgctgcggagactctcggcgttccactggactccgtccatatctccgaaacaggcaccaacaccgttgccaacacttcttccacagctgccagtgcctctagcgatctcaacggctatgccatctacaacgcctgcgcccagctcaacgagcgtctcgcacccttcaagacccagcttggccccgaggccaccatggctcagctcgcccacgccgcatatttctctcgagtcaatctctccgcacagggctactatcgcacacccgaaatcggttacacatggggcaagaacgagggcaagatgttcttctacttcacccagggtgttgctgcggcggaagtcgagattgacacccttactggcgcatggacatgcatccgcgccgacgtgctcatggacgtcggccgtagtatcaatccctccgtcgactacgggcaggtcgaaggtgcttttgtgcagggcgtcgggctcttcacgatggaggagtccctgtggttcggaggcggtccgatggcaggacaactcgcgacccgtggtccgggtaattacaagatcccaggctttagagacgtgccgcaggtgttcaatgttagcctgttgaagggagtagagtggaaagagttgaggactattggcaggagtaggggtgtgggagaaccaccactattcttgggaagtgtggtcttctttgccattagggatgccattcgggctgggaggaagcaatggggcgttgaggcgaagaggtttgtgccgagagggctgcgaggtgcggcgacgaatggagatggaagcgcggatgctgtggaagtaaccaacggcgaatcaacaaacggagaagcaaccaatggtcacgccacggatggggaggccaccaacggtgatgtagcaaatggtgaagtagccaacggcgaaaccaccaacggagagtcagatgaatctgtggccacaagcgagccaagcagcgtttcagaagacaccacagccaccaccccagatacggcctctgacgccgatgcggtacaaccacaggaccaggaaccaccagcagaggcggaagacggcatgctgtatctcgatagccctgcgacgacagagcgtatcaggaacgcatgtgtggatcctattgtgcagcgcgcgagggtgaagcaaggggagggggacaagccgttctttatttcgatttaa

SEQ ID NO: 382 - DNA, 966 bp, Pseudogymnoascus pannorum
atgacttttcatcctgacactctccccgatctcaagggcaaagtattcatagttacgggtggaaattccggcataggctactataccgtggcccatttagcaggacacggggcccacgtttacatgtgcgcccgatccacggagaagggtacagcagccatcgccagtatcaaaaaaatgcacccttcagccaacattgacctcctgcgaatggacctcatggatcttaccagcgttgttgcggctgccaagcacttcctcgccctcgaaacagccttgcacggcctggttaacaacgcaggtatcatggcgacgcccttcgaaatgaccaaagatggctacgaggcccagtggcagaccaactaccttgctcattggatttttacggatcgtctgcttcctctgctgcgacgaaccgcgaagacacttcctcccggtggcgtgcgcatcgtcaacctcacttcatcaggccacttgagcgcacccaaggctggcatcaatttcgaagacctatcgctcaaggacggtggcccctggcagaggtacggacagagcaaactcggcaacattctgcacgctaggaccttgcacaagatgtacggccccggctctcccagtgcgcgcaatggcgagggcgaaatatgggttatgtccgtgcatccaggtgtggttgagacgaacctcgcagcatcagtggggggatcaggatcagtcatgtccactattttctctatatcaatctcggcattacgcatgtttggattgatgtatcctgccgataaggggtcgtggacaagtttgttcggcgtggcgagtcgggatatgaaggcggagcagagtggcacgtattttgaagtcttcgggcggtttgcggagccgaaatggcagagcagcgcggccaaggatgcgaagcttgcagagagattggagaagtggacaagggaggtgataattggggagttctag

SEQ ID NO: 383 - DNA, 915 bp, Pseudogymnoascus pannorum
atgggtagtgcgtatgaacctgtaaatccaacagcaccatgctaccaactcgcgtcgatgccacaattggccgaggccataagcaaggaagatgactggactgggaccaaggatgctgcggcacgccgacgggcacagactagacttaacacaagggcatacagaaaacgcaaagccgcagccgcagccaggatgccgattaattcagatgcacaagtggaatgctgggacatcaagaagcaattcgtctccgttgtcccggcctcccgagccaagcaactatacgatgcgagaaatcccctgcttccagataaatttagtaaagcgcagtttaacattgtattccccctttgtccagaccacctcatcacactcctccaattcaactccctccgcgccatggctgtcaacagaactctaatctcgggcgtccttgtcacgccgctcgactgtggcgaggaaattatccacgtcgttccctaccctaccaagcctgaactactccctccgacacttctacctaccattcttcaacaaacggtgccgcatggtgactggatcgacatgtttccatgccctgaggtacgagacagcctaatccgcgcagccggcatgattgacgaggacgacttgtgggctgactgcattggtggactatatgaggggtttcccgacgatgagattgagcgacgcggcctcattgcgtggtcgccgccctgggacatcgctgggtgggagatgtcggaagggtttttgaggaaatggggtactgcaatagtatatcgagcatctatgatattaagagcaagtaacagggtgctgcaaacttatcttgtccacgttaatggtggtggagctgagcttccttccgaaaaccttttgacctacacgacaaatagttttttgttgggctaa

SEQ ID NO: 384 - DNA, 1524 bp, Pseudogymnoascus pannorum
atgttagacttggaatccgacacgcaagttggccggacgcgtaatcaggtgtcgtcacggtcaaaacttcgcgacagctgccatgcctgtgctatatcgaaggtcaaatgccccaaagagaagccatcatgttcaaaatgcgaattccgtggcatcacatgtcagtacttcctagctaaacgtcccggacgcaggcgtgagaacgcaaccaacagcacagggaatagcacaggtcaatgcctgtccaacagaaaccttgggactaagtccagctcaagttcaaaccccaacattagagccaatgttgatagtagtcattctatggagtgggatgcatttcgagatactcaatctactcctggggtcggcttgttctctaaaggcggcacaataattgcagctaattcgtatggagccgacagctaccttacgacaccattatctttgagcgtgccatcatctccaaggcaagacaatgcgttcacgactaatgcagcccgatatttcgtgcctggagaggcaagcattttctcggggctggcagacttcggctctgaggccaacgacatggacttcatcatgtcagccatggactctccgtttgacctaattggaatggacagtggtagtattaccggaagcactactcagacaccaaatgatattgagtcgcttctcatgccagctgagaggatcaatcttgacaatgcctcattagacacgccatcatcgcttgatctacttagtacatcgagtggggcttcatcgcacttatccaaagcccattcgctatcgactggaaggactagtatggcagaaatcactgatacgcaatgtggatgtttggcacaagctctagatttattgaagaagctgtcatccgcgtcgagctcctctcgagtcactttttttagtcctgatggtggcgaggcgcctagaataaccgatcctggatcaacgcagaccgtcatcttggagaataagcaaagcatggaagctattagccacaagcttgcgtgttgttcatgcgccgatgaccgtttcttgctgaccatcctctctatgatcattctaaaggtattagaacgatacgcagctgtgatacagacacagccccacaaggcaggaaagaatgagggggaagttgaagtggcagccaggataccgatcagcgttatctctagcggcgacgactggatgtgggcgccgagccatgcctacaacgaattgcatgcggactgtggcagtgggcgtgtggctgctcagcttgttctcagtgagctgcaccgcgtgcagaggttagtaaaccaactttccccaaagctcaaaggaccaaaggagagagaaaaccaaaatatggccccgaatctgcgatactggggccgagccagagccacagcagatagcgataggatggccgtaacgcctatattggcgagtaccttggaccaaatggaaagagacgttcgcaagagccttagtactctgtctgcggagattatcaatgggttacggcaacgttaa

SEQ ID NO: 385 - DNA, 1347 bp, Pseudogymnoascus pannorum
atggatagattgacagaactcaacgaccattgcgagcaactcgccacagcggtcaaaagcctcgccgataaccttccaggcgctgactcttccgatcagctggggacaaatgctgatgccgatacggacaaagatcaaactttacccaacagacctaagtcaagtatcctggccagtattgtagcaatcaaagctctggtcagcggacctacggacttcctccaggattttgctcgccagattcaaatccttgcctgtattcagtggctggcagaatttcaagttttggcatgcatcccgttcgatgaaagtttgcctatcaaagatttggccgacttggtaggagttccggaggggcagctggttcgggtcatccgtctaacagccacatgcggatttctacgggagcaaacaactggctttgtatcccacagccctctctcggcacaatttataaccaatcagttgttacttgatgctacggtgtttattgctgagatggctacccctacagcattgcagatgccgcatgcaacgcagcgcttcggggcttcgacaaattcctcagagagtgcattcaacctagcgctgaacacggtacggccatttcatgtagctattcaggagcgccctaaactgcgtcgacagtggtcagcttatctttgtcatgcagtggggttacaccaagaggaggaaatagtggaagtgctgtcgcggctcaactgggcaaaccttggcaacgcatgcatagttgaagtaggcgcaaaatcatcctcgatggcaaattctctttctagaaggttcccaagcttgcgcttggttgtgcaagttgataatacgcagtcttctttgctagatcaagactgtatgctgcaaagctcggggctaggaagctctattcaagacagctctagctctgggtctagtccttcttccacaaaccaatttgtcgccgttacatattgtgccatgagcatggctcagtccataacagatgctgccgtctatattcttcatgtacccacggcatcctcgggactaaccattagagcggtactggatgattacttaggcgtgcttcgtgccagtggcggtatcatgattgttttgacagcacgtctacttcctgagccaggtagcctttccaatcctgaggtcgaggcagtggcacgcgcacgagaccttagcgtacttcatctagccaacgatagcgagatggaaatgtctgagctagtgagcatcataaaaactgtgggagatggcgctgggaaacttgtcattaccaattatcttcggtcaaaccacggcgtcattctagccttgactattaagtgccaggcttattaa

SEQ ID NO: 386 - DNA, 1002 bp, Pseudogymnoascus pannorum
atgaaaaatgacaagggcggttacaggcaaattaataagtcgctgaatatctacgccttcgatgactaccttaaaggacagaccgcacggctgccccaccttgagagcgttgaacagctcaccccgagggtgcttcgcattcttggccagaaccctggaaaatttacgtatcaagggactaatacatacattgttggcactggtcaacaccgactcatcatcgacactggtggtggcggtccggcatgggctgagctgattgcttccacgtttacatcaatgaacattaccctatcttatgtgctgctaactcattggcacggtgatcatactggcggtgttccaagtctactacgtctatatccgcatctcacggattccgtctacaagaacgaacaggaacaaggccagcagaacctcacaaacgggcagatattcgtcgttgatggtgcaacaattcgtgccattcatgcacctggacattcagaagaccatatgtgttttatactagaagaggagcaggccatgtttaccggcgataatatccttggtcatggtaccagtgccgtagaagacctaggcacctttatggctagtctgcagaatatggccagccagggttgttatatcggttattctgcccatggggcaacaattaccaacttgccagctaaaattgcgggagaattaggtaacaagtggcggcgcgagaaacaagtctcagaggggcttggccgagttcgtagtcggggcgagaagagcgttactgttaaggatcttgttactgaaatctacggagattcgttagatgaagatgtgaggatgctcgcactagagccgtttactgacgaagtgctgcggaagttggcggatgatggcaaggttgccttcgaaattagaggcggcaaaaagaagtggttctctgtggaagaggcacagcaggcaacagttcggcggttttcacctgtggaaacttcactagctgtaactattcaagtttaa

SEQ ID NO: 387 - DNA, 5340 bp, Pseudogymnoascus pannorum
atggaaattgtctattttagcaatgaactccccaaaaatgacttgcaagacgttttccgccgcctgcataaccacagcaaggacaagcatttttcggtcttggaccaattcatacacgaggccacctcggccgtcaaggatgaagttcgccaactaccaactaagctgaaacagctaattcaaccatttaataccattatggcatgggcggaagatacccagctccgagaaggcccaatctgtttcgccgtggacggagtgttacttgtcgttgtccaactggcaacttacattggatacattgaaagtcgccctggagatttatttgacttttcaactacgtctcttgctggcctaggcactggcctattatcatcgagtgccatctcattgtcgccaacattggccgacttgccactggcaggcgcagatgccgtccgcctggcatttcgcttgggaatccatgttatgggtatctcagaaactctagaagcccgcgatgtgtcagaaaacccagaatcgtgggcgtatgtggttcaaaatgtcgacccagcaacggctcagagagaactagataccatccactccagagtcgagatacctaatactagcagaatatttataagcgctgtcagtcggacttcagtcacagtgagcgggccgccatcaaggttaaaagcgctgttcaataagtcagaattcttccgcgtgtccaaggtgattgaattgccagtgtacggcggcatctgccatgcaccccatgtattcggcctgcgggatgtacataaggtcgttcatggctgttcattaaacgccgctactacgaattctccaccggtgatgccagttttatcgacaggtagcggcctgccgtacctggccaataattcagtggagatgttcgaatgtgtcatctcagagctctttacgaaaacaatatattgggataatgttgtcagttacattgtcgaccgagtaaagtctaccgctattacggaaactgtgcttcactgcttcgggaactctacacccctcaatgatatcgatgtggccctaaagagcaatgtcccaaatcttgacgtctcaattaacagtctcatgccatggatctttcaagttgcaccaagagatggtacaccccgcggcactgcacaatctaagctggccattatcggtatgtcctgcagacttccggggggtgccacagataccgagaagttttgggaaattttagagaaagggcttgatgtctcacgacgaattccagctgaccgcttcgacatcgacgcacactacgacccaactggcaagcagcaaaacaagaccatgacacagtatggatgcttcattgatgagcctggattatttgacgcacccttcttcaacatgtccccccgtgaatctcagactgtcgatccgcagatgcgtctagctcttgtcactgcatacgaggcactggagcgtgctgggtatgttggcaaccgtacagcttccacacagttgcaacgtattggaacttattatggacaagctgccgatgattaccgtgaagtcaaccaaggccaagagattggcacatactacattcctggcggttgccgcgcattcggccctggtcgtatcaattacttttttaaatttgcgggtcccagctacagcattgacactgcctgctcttctggtcttgcagcgattgagctcgcgtgtcaggctctttggagtggtgatgtcgatatggtcgttactggcggtgtaaatgttttgaccaaccccgattgtttcactgggctatgcaatggccattttctaactaaaggtcacaacgcgtgcaagacttgggattctaccgctgatgggtactgtcgtgcggacggcattggatctcttgttattaagaaacttgaagatgctgaagcagacaacgacaacgtcttaggcgttattcttggtgcaggaaccaaccattctgctgaggctgtctctatcacgcacccccacgctggccatcaagcatacctatcccgccaggttcttcgccaggctggtgtagatcccttagatgtatcctatattgagctccatggcactggtactcaagctggtgaccatgaggagatgcagggcattatggaggtttatgctccgcttatcaagcgacgtatgaaggatcagcctcttcacattggtgctgtaaaagcaaacgttggccatggtgagtctgttgcgggtacaacagcactgattaaagtgcttctgatgctacagaaaaactctattccaccacatattgggatcaaaacggagatgaaccctaggttcccccaagactttgacaaacgaaatctccatatcaacttagagatggcacaatggccccgagttccgcctaagaagcgtcttgcagttgttaacaactttggtgctgctggcggaaacacgactatggttttagaagaggcaccgactcgtgtcatatcggatgctgacccacgcgatactcacatcatcgctatctcagccaagactaaagggtcgttaataggaaatatcgagcgcttgattgcccatcttgatgcgcacccagatataaatctcgccgacctttcatacacgacaacggcacgtcgttaccaccacgccaaccgcgtggcagtagctacttccgatgtaggtcacctgaagaagcagctggcttcccgcctagagaatctcgattcactgaagcctgtgggaaattctggcccgccaccaattgcttttgccttcactggccagggctcttcttacaagtctatgaacctcgagttgtaccgagacgtaccaacattccgagagcatattcaatatcttgactccctcgctcgaagtcaaggctttccatctattgttcccgctctcgatggatcccatcctaaagaccacgcacactcgccagtcgttactcagcttgccctagtctgcactgagattgctttagcaaagtattgggcttctctcggcgttaaaccagatgtagtaattggacatagcctgggcgaatatgctgcgatgcacatagctggtgtggttaccgcaagcgacaccatattcatggttggacgtcgagctcagatgttagaagaaaagtgcaagattaatagtcataatatgatagctgttcgagcttctcttcagcaaataacagagggattgggagaaaagccgcatacaattgcttgcattaatggaccttctgatactgtgctcagcggcaccaaggagcagatggaagaggttgccgtgttactagaggcggtcggctaccgttgctttaagctagatgtcgctttcgctttccactcggagcagactgatccaattttagatgcctttgaggcaatttcaaagactggcgttctttttcagggaccaaaactgccagtaatttctccattgctcggaaaggtcgtttttgatagcaagacgcttaacgcaaactatgttagccgcgccactagagagcctgtcgacttcttgtctgctttgaaaaatgcccaaaagatttctactattagcgatgacaccatttggatcgaaattggaccacatccagtctgtactaactttgtcaaaaccacaatcccgtctacgaagcttgctatcccatcgatccgccgtggagaagacaactggaaaactatggctgagagcatggctgctctgcatcttgctggatttgcagtcagttggaatgaattccaccgcccacttgagtctaagctacgccttctagatttgccaacatacgcctggaatgacaagaactactggattcaatacaatggcgactggtgtctgaccaagggcaataagttttacgatgctgaaaaggaggctgccagagtaaacaaactgacaaaggcactacctgcgagcaagattcaaacgacgactgtgcagcagattatagatgagacttttaacggtttcgcaggcacagtggtaatacagtcagaccttatgcaagtagacttgcttgctgctgctcatggacacagcatgaacaattatggtgttgttacatcttctattcacgccgacctctcatacacccttggcgactatctctaccgcaagttatgccccaacgctaaggatgtcaacatgaattttgtcaacttggttgttacaaagggtcttgttgctcaaaccagtaacaagactccccaattgttccgggttactgcggtcacttccgatgtccgctcaggcgtggtcgacttgacgtggcagaatgtggacaacgatggcaatgtccacgagccatttgcaaccgccggtatactgtacggggatgcatctgagtggatcttgtcttgggccccattttctcacctcatccacggccgcattgaagcactcgagcacctagctgccgaaggaaaagctagccgcttttcgcgtaacatggcatacacactatttgctagcaaccttgtcgactacgccgagaagtaccgtggcatgcagtccgtagttatacatgggctagaagggtttgctgatgtgcaactaactacaaaggagggtggagtttggacagtccctccatatttcatcgacagcgtggtgcatttggctggttttattatgaactgctccgatgcaatggatgcgaagaacaactactgtgttactcccggttggaactcgatgcgattcgcaaagcctttggttcccggggccaagtatcgttcgtacgtcaaaatgattcccacagtcgaggactcaacgatttattttggcgatgtatacatcatgcaagacaatgttataatgggtatggtcagcggcatgcagttccgcagatacccgcgcatcctcctcggccgatttttctcgccaccggacaagatggccgcctatgaaggcaagccaaaggggcaaaccagtgtccctaaaattgcaacttcagcgccagatgcaacaaaaattattgcacccgaccgtgaacctagacttggcagtgacgacaagcacagtgaacatattcttcctgattcccctaccattgcgccgcctgtccccaatgccgcggcaccacctgtcgtcgaatctgcagccgcttctgacagtacaactgcaaaggcaatcatgctcattgctaatgaggccagtctagaactctccgatatggaagacgatgcccttttcgtcaatttaggcatcgacagcttgatgtcactggtaattgcagaaaagctgaggtcggagctggatgttaaggtaagcggtagtcttttcttggactatgagactattggcgatttgcggcagtggttagatgagtactataactag

SEQ ID NO: 388 - DNA, 1284 bp, Pseudogymnoascus pannorum
atgccacgcttcagctcattctggcctgctttacgcgccatctccgaaatctcaaaagtcaataaaactgtcgatgaggaagcgctggaaacgttcagaacgctggagccgtcagagaaaagtattgggatatcgaagtcgcccggcattgggagtgctggagtttcctcgtcctctacagtaccagaagtaaaagctgctaagcaacgagagcaacaccgaggaactcccaaacgagcggaccccaaaagccagcagacagcgaaacagccaaattcccaagtcgaagtctatggccctcgagtaggctgggcaacagataatattttggacgtcgaagtcgttcttgcctccggagaaattgtcaatgccaacgctacttccaatcaagatctattgaaagcactgaagggtgggaacagcaactttggtatcgccacatcatttaatctgcgcacattctctcaaggccaaatgtgggcaggccttcttggccaatccatcagtagccgcgaggaagttttccaagcggtctccgatatcgcgtcgaatgccaacgaggacccttttgctgctttggtggctgacttcaagttcaattccgccactaaatcttgggtcatgaaccataccgtggtatacacgaagccggttgctaatccgccaatatttgaggcgttggttggcattaagccacaattaagcaaccaaattgcaataacaaacatcagttccattgctctggggcagaagatgggggcaaaagtcgcatacaataagaaccacctgtcttacacgggtacatatggcaacgatgcagcacttctctccaagatctttgatatcagcaatgccaccgttcacaagattatgccgcagatcaacggagggattaagtgggttataatgatggagccatttccagcgctggttgacagctttggagaaaagaatggcgggaactcgcttggtctaagtgccgagactggagatcgcattgtcatcctgcaattggcgcatttcgaggaccacgatgcgaatgacttggtcgacacggagctcaaaaatatgttctatgagatcgcgagcgcagcatctgagatgggactcctgcgccgtttccagtatctgaattatgcagacaagcaacagaatcccatagcttcatatggacctgagaacgtggcggcactgcaagccacgagcaagaaattcgacccgaagggtttgttccagagacaggcgcccggcgggtttaagctcggaattcagcaagtgatttaa

SEQ ID NO: 389 - DNA, 2031 bp, Trichoderma Virens
atgttgactatgtccttgaagaggcacttcccatttcaaatttctagattgcaagtcaaccaatccaacccccgcttgcccatctctagccatttgcagaataatcattccgagccaaagttgtccatctcttccttccaacctatggccggttttcaatatccaggtattaacttgcccgttgacacctctcaacgttatgatctggataatctgccaccagtttacggtattggtatgccacaagctaggggtgctacttctgaaattctgccagtcagggaagtcgccatgatgttgattatggaacagttgactgataagttgaactggcacgaaaaggtcttcgacgaagcaattgtccaaaaatggaggcaggaagccaagacccaatctgagaatggtttgtactcaagagtcatggaagagaaaatgcactggaatcgcattccaatgccacagacaaggttgatctctgacgaagcctttgaattctgcattgccgaattgaggaataaggctgcttattttgccaaaaccgggttgatccccactttggattctgctggcaacaccattgttaagtctgacgacttgatgaatgctcaactgagggatgaattggtccaagctttcgaaactttgagagccgatcaagcagctaatgtcgattggcacccaggcactaacgacatggttcagaacctagtccatccctctatgtatccattcgttttttctaggtcctcttttatcttggaagagcaaatcggcctggataacgccttcgacttcgttggtaagggtgaaattcccccagccattgatagatttccagattacggtaggaggttcttgaacatttgttggcaaccacatttcatgggtattgttccacccgaataccgctcctccttgtatcagtggttacctgctaatgttgcctttcgcgatgacggttctgccaaaattacttcctatattaacaacctgcatcccggtaaatacccagcgatttacaccgctatcgaacatgctattgatgccgctattccagcttgggatcaatgtttgagagaggatttgagatggagagatactgttgccgctggtagaactgaatccagatttgatgctattactgaggctgatgacgaccaagaaggtttgtggactgtctctatgaagtatgaatggccagatgacgagtcttggcacttcactaataggtatcaatatggtgatccacccaaaccatccatgggcgaaagaatctatcccggcaaatgggttgaaggtagggaagctattattccagaacccagacagtttaaggaaatcgattacactcctccacaaaggattcgcgacaagttcaaggaacacggcttgcagatcatcgtcaaaatggcttccattgaattgactccagaaaaaccctactttccagctggctcatggcacattgaaggccaaatgaacgagagaatttgtggtactgctctgttttacttggattccgagaatgtcaccgactctcatttgtccttcaggatgcaaaccagggatgatctcaacgaatccattgagactggtcaggacaattataactggttggaaaggatttatggcaccactctaggcaacggtggttcctgtattcagaactacggtgatgttagaacctgccaaggtagagtcctggctttcccaaatgttttccaacaccgcgtttcttctttcaggttgaaagatgaaactaagcccggtcacagaagatttttagccttgtggctggtcgatccacatgaacgcattgtttccactgctatggttccaccacaacaaaaagattggtggaccgaagctgctaaagcccaagaggattctcaaatggaaattccagagtccttgatgactgttgaagaagctttggagcatcgcttgaagctgatgcacgagagatctagacaagaggctgaaaccaaacaacatactgagaaccgctcttacaatttttgtgaacactaa

SEQ ID NO: 390 - DNA, 1698 bp, Trichoderma Virens
atggctagattgattgccttgttggctacagttccagcattggtttctgctgctgctattaacactacttgtagatgtttgccaactgacccatgttggccatcaactgccgattggaaagcttttaatgctaccgtcggcggtaaactaattgctactgttccattggcttccgtctgtcattcctcctctttcggttgttattccgcttctaaatgtgatcagctaaaatccgtctgggacttcccatctacccatatcgaatcttcttctgaccctgttgccccattcttttccaatagaggttgtgatttgtttactgctccagatgctcagtgcgtcgttggttccttggtccaatattctgtcaaagctgccaacaaagctgattacctggctaccattaagtttgctcaacaaaagaacatccgcctggtcatcaggaacactggtcatgactactatggtaagtctactggtactggtgctttggccttgtggacccataacattaagactacccagttgttgaattacaatgccaacggctacaagggtaaagccattaaggttggtgccggcattcaaaactctgaagctcaagcttttgctcatgctaatggtttggctttggttactggtaatggtggttccgtcggttttgctggtggttattctcaaggtggtggtcatggtccatttgctactaaagctaacggtttggcagcagatcaagtcttggagtgggaagttgtcacttctacaggtcaatacttgattgcaactccatctcagaactctgatttgtattgggctttgtccggtggtggaggtggtacttatgctgctgttttgtctatgactgttcgcgcttatcccgatttgccatcttctgcagccaatttgactttcactaatcagggtgtcactgatgatgctttctacgctgccgtctccaaatttctgacaactatgccctccattgttgattctggtgctactgccgtttttttattggctccaggcattttcttgttgcagccagttaatgctccaggtgttactaaggctcaattgcagaccttgttgaacccaactctggactatttgactgcaaacggtatcggctacgatttccatgttgatcagttcccaactttcttggactcctttaacgcctataatcccccaccaaatgttaccgaatacaacatcggtggtagactgatcccaagaactttgttcaccactgcttcaggtgccgcttccgttgtcaatgtctacagatctattaataatgccggtggcgtcgtttctggtgtctctttgaatgttgctaacggaactaaggtgtctaatgctgtcaacccagcttggagaaccgccattacttctactgttatcggtattccatacgatccactggtcttccaaaacaacctgaacgctcagtctttgattactggttctctggtcccacaattggatgctttgtctccaatcaaaggtgcctatctgaatgaggccgatatgaaccagccgaactttcaacaggtcttttatggttccaactacgccaagctgaaatccattaagaacaagtacgatcccactggtaccttctatggcttgactgctgtcggttctgatgattggaccgttaacaacactacaggtaagttgtgtagaattgcttag

SEQ ID NO: 391 - DNA, 915 bp, Trichoderma Virens
atgcacccagaacataaagtcgaacccgcttcttccgccgtctccactttgttctacattccatacctgatctgggaatttaccgagtccaatttcccaacctttgtcattccaaacaccactttcggtgtcttgggcgctttggctggttctcacttggctgatggtcaattaccatctttgtggcaattgtcccaagctttgcccttggtcgttgccttcaattggtacaatgtcctgatcttcgatctggccaatcaaagatccgaagaatccgtcaaagaggacctgattaacaagccctggaggccaattccatccggtaaaattaccggcgaacaaactagaagatccatgttggttgccgtccccatcgccttggctttgaattattggttgggtgtctggaaagaaggtgtcttcatccaaatcttgacttggttatacaacgacctgaagggcggcgacgaagttgtcagggatttgatcatttccatcgcttacggttgtttcaaccacggttccttgagaattgccttgggttcccaagccactgtcaatcaagaaggtatgacctggatcctgatcattagctctgtcatcttgaccactatgcaagttcaggatttgaaggaccaagagggcgataggactagaggtaggctgtctattccattgctgttgggcgaaaagttttccaggttctctatcgctatttctgccgctgtttggtcctgtgtctgtccatttttttggaagttgccaccattggcctatgctggtccaatggttattggtgctgtcttgatgacctccgttttgttcaggaagaccgttaaagccgacgatcaatcttggaagatctggtgcttgtggactatgtccttgtactctttgccactgtttactttgtga

SEQ ID NO: 392 - DNA, 1782 bp, Trichoderma Virens
atggcctcttatgactatattatcgttggtggtggcttggctggcttagttttggctgctagattgactgaagacagttccaaaagggttttggttttggaagccggtgaagatttgactgctgatgctagaacttctgtccccgctatgtggccaactttgttgaatactgacgctgattggaaattcagaacagccgcccaggctggtttcaacaatagggagatttcattcccacaaggtaaattgttgggcggcagctctgccttgaatggtttgtcctttactccatcctccaaagctaacgttgacgcttgggctaagttgggtaatccaggttgggattgggcttctttctctaagtctttagccaagtcttatactctgacttccaaggctggtactactggttctggtccattgcaattgtcctacccaaacgacaccaacaactcttggccaaaaatttggcaacaaaccctgggttccttaggttttaggcaatccggtgaatcctacacacaacaatcttccggtcccgttactgttgccgattctattcatccagctactaaaacccgctcttacgctggtaatgcctatttggaaccagctaggtctagggaaaacttgactgtcgttactggagctgctgtttctaaaattgtcttcgcgaaagatggctctgctgttactgctgaaggtgttcagtacgtcaaggatggcgaaactcaaaccgccaccggtaaagaaatcatcttgactgcaggcactattaattctccaaggattctagaacactccggcgtcggtgattctaagttgctagccaaactgggtgtcgatgttgttattgacaaccccaatgttggtgagaatctgcaaaaccacccaatggcaggtttgtctttcgaggccttagaagatgccgaaaccattgatggtttatctagacaagatccagcagctttgcaagctgctatggctgcttacgctcaacaattgggtccatttgcttcttctggcactaataacgctgctcaactgccattcccaggtattcagactgccgagggtaaagctgaagttgaggctttgattgaaaagtacattactggtgctaagaacgtcacttccccatttgacaaggcccaagccgagttcgtcaggtctattttgacttctccagaggaagcttctggttactacatctccttttctggcttcgcttcttttaacccagatggttctatggctccaccacctccaggtactgaaaaatacttctctgtcgctttgttgttgactcatccattgtccaggggctccgtccacattaactctgcctctgaaacctctactgatgttactatcgacccacagtacttctcccatccactggacattgaaatctttgctagacacttgcgcttcgttgaatctttggcctctgctgaaccattggcttctcatttgaaggttggcggtaagagaaacccagctgctcctccagctggtattttttctgctgcatctggtttggaaaaggcgaaagaatatttgagacagactgctgttggtgctcaccacttcactggtacttgctccatgatgccaaaagatttgggtggcgttgttgatgctgaattgagggtttatggctgtccaaatttgagggtcgctgatgcctctattatcccattgactccaagagccaatccacaagctactgtttacggtgttgctgaacatgctgctaccattattaaaggtggtttgtaa

SEQ ID NO: 393 - DNA, 1668 bp, Trichoderma Virens
atggatttttactacgccaatcaacaagctatcttgactgccgttggtgctttgtctggtatcatcgctcatattactgtctatatccgcggtgaatggcacgtccaagccccacaaattaccttgcaattgttcgctttgtacgttggcgttccagttttagtcagaattttgaaggacactgtcgttgcccaaatcctgcagggtgtcgtgttttggtcctacggctatattctgggtttgatcgcctctattttgttgtataggattgttttgcatcccctgactagggcctcgtttcagggtccatggtatgccagattcactaagatttggcatgtttgggctgcaagaggttccatgaaccatagggtcttggacgatttgcacaaaaagtatggcaacttcgtcaggactggtccagctgaaattacagtcttccatccagatgttttcatggccgtcgatggtcccagatctgaatgtatcaaagccgaatggtacgacattttacatcccggtcaagccttggtcactgctagaaataagtccgttcatgctgctaggagaagggaatggaattctggcttcactactaaagctttgtccgaacacgaggctaagatcctgaagtacgttgacaagttggatcagtgtattgccgaagacgcgaagttggaaaatgtcaccaatatgcgtgatttgctgttgtggttcggcttcgatatcatgggcgacttcgtcttctccaagtcttttggtatgttggagaacaagcagtggcatcatattattgtcagactgcaaagggctctgtctctactaggtccattctcctccgtcccatggttgatccaaattggttttaaactggctccaagggtgtctgtcttgaaagattggttcgacactgttgcctggtgtcaatcccaaatgagggatagactggaaaacggttctgcttcccaaagccaagacttgtcctactacttgatggaaaaggattctgaaggcaacggtgctactgagaacgaaaaatggcactgggctgctggtgattcattgttggctattgtcgctggttctgaaccaacagcagttgctttgattgctgttttttgtgaactaggtaggcacccacagcacgctgagcaaattcatgaagaggtcaagaacgtggacgttactgatttgaagactctggtgtctttgccccatttgaatgccgtcatcaaagaatccctgaggttgcacccagctttgttgaccggtggtaataggaaaactaccgcttttgggttgaccattgatgatcaatttatcccacccaataccactattgtggcccccaggtacactattggtaggttggagtcttgtttcgagaggccatctgattttatccctgaaagatggactactaggcctgaaatggtcagaaatggtgctgcttacgctccattcggtactggccatcactcttgtctgggtaaaactttggctctggatactatgaaatacgttctggctaggatcttgaaaaactacaggttcagggctgctccaggtgaagattccttgtctgccctggaaaccgtcagggatcagtttacttctaacccaggcattctgaaattgcagtttgaaaagagacatactatcgactga

SEQ ID NO: 394 - DNA, 864 bp, Trichoderma Virens
atgatgcaaccaccattgccatcagctactccatcttggagaaacgacacttatgctgctatctctccagccagaccagaattgtctgcttctggtaagactattgtcatcaccggtgctggttctggtattggtagagaaactgctaccgcttttgcagctgctggtgctgctagaattgctttgttgggtagaacagaagcttcattgaaggaaaccgctgctgctttgccatctactgtttccacttcctcccatgttgtcgacgtcacttctgaagaatctctggctaaagttgctggtgaaatcggtacttgggatgtcctggttttgggtgcaggtcatgtttctgttccatccactattgccgcttccaactttaccgaattctggcaatcctttgaaaccaacaccaagggcacctacgcctctttgcatgctttcttgccaactgctaatgctactcatgctgctgttattgctgtcactactggtactaccgcattgcctgctactatggtcccaggtctgtctgcctacatgtcttctaagttggctcaaactaagctgattgagttcttggccgctgaacattccaatttgtttgccgctactgtccatcccggcatggttgagactggcatttttaccaagtctggtgctaaggccgaggctttgcccatggataaagtccaattgccagctcattttattgtctggttggcttcctctgaagctgcttttctgaacggcaggtcagtctgggctaattgggacgttgacgaattgaaggctaaagccgaagccattcaacaatctcaactgtttactgctggtatcaatggctggccatttgctccatag

SEQ ID NO: 395 - DNA, 1068 bp, Trichoderma Virens
atgtctgctggtccaagaggtattcaattgctgatttggatttgtgtcttcaccgttttgtgtaccgtctgcattggcctgaggttctgggctgctgtcttgtctagaagaagagctttgccagacgattacatggtgttgttcgctttggctaatactatctccttggagggcgttgtcatctgggccattttcaacggcttgggtaagcatactaacgaattgaccccatacgagtttggcgttcagttcaaattgattctgtcctctgccgtcacctggttgttgggtactgtcttcatcaagttgtccgtcctgtggttgtataccagagtttttagcaccaagaagttcaagctgtggtcccatatcatgatgggtgtcgtcggctgctatggcgttgcttttttcgtcttgttcatgactcaatgtagaccaatttcccaacaatgggatcccgtcccaggcggttcctgtagaaacatcgtgatccaggaattaacctctgtttccttgaacatggttgtcgatattgctatcgtcatcatgcccttgcccgtcttgtggaacctgcaattggctgtcaggtctaagttggttgtttccgttatgttctccattggtttcatcactattgccattatggcctggcgcttgcagttcaccatttccaccctgaacgacaccgacttcgttttcaacttgttcgatatcggcttgatcagcttgttggaattgtggttgggtattatcgctgcttgcatcccaactttgggcccactgctgaagacttacgttaagccagtcattaccaggttgaccgagttgtctgatggtaacaatattaggttgcaatctgccactgccggttctaaggctgattctcgctccactttgtacggcaagaagcaatactcccaaatcgaagaggaatcttctaagtctttccacactaacggtgctgagatcccaaccgtcaccaccaagatcaagtacgatccaggtaacaaggttgtcaccgatactagaggtgtcatctatgtccaacatgatattgaagctcaatag

SEQ ID NO: 396 - DNA, 879 bp, Stereum hirsutum
atgctcccttcgacgtacgcctgtgcaaagtatcacttgtacaccgcggtcctattcacttggacagattacaagacgattttacttccagttgccacatttgcttccgccaccgcccccgttcaatcgctctcaagctttattcaggccttgctttggatatggatccacttgcttttatgtaatgtgtccaaccagacaagcggggtagaagaagataggatcaaccgacactggcgtccacttccggcgggcagaatcacatctcaccaagcctcccgcctacgctggactacggtgttactctgttttatctggtcgagcttgtatggcctccgactagtgtccatcagcacgatccttttcatcacgacttatctttacgacgagattgggctttcgaaccatccaatcgggaagaatttctgcaacatcggaggatacatgtcattcgagcttggtgcaacgattctcataggcacgtctataggacacgaaaaacaactggatattatatcgctcagcgctaccatgctcagcgcagctgttatcttcacgaccatccaggcacaggacttctcagacgtcgtcggtgataaagctgcaggacgagttacgcttccgatatacgcaccagaattttcccgcttccttaccttcgtcgccctcacaacatggtccatgattctgtcggtattttggggaatagggctgctgtgcgcgacagtgctggtttcgttgggggcgtacgtaggctaccgttattatttctggcgtactcaggagatggacgagaaatcatatctcatcttcaacatatggctgattgtcgttcatcttctccctatccacgctcggacgaacgtactgaagttttga

SEQ ID NO: 397 - DNA, 1524 bp, Stereum hirsutum
atgatccctacggaatttcccaatggctcattattagtctttgcgatccttgctctggcttttcttctccgaagttattacccccaccgtcgtttacccgtcccacctctatgcagagtgaatcaaaaacacagcgaacagcgctcgtgggttacttattccatacagtctaagacacttggtagtgcttcatcgcattcgacctgctctcctgggctaattgttgttattaacacccgcaatgccgccacagatctcttggagaaacgcaagtccttcgcctgccggccccgtttccccatggcggagcttatggggcgacagaacaacgtcgggtttacctactacggcgagaggctacagcgactccggaagacacttcatgcttctttgaatacgaaggcggtgacggatacttggtccaacatgcttgaggcccaatcattggctctttgtcgacacctctttcggtctccgacttcatttgtcgactcaatagagataaatatacaggaactgattggaaggttctcatacggccacaaaccagatgccgagtacatacgtgtggctaacgatgtaatgcaccacaccggccaagctcttcgtccaggaagatggatggtagattctgtaccagccttgaaatggattccttcctggatgccgggagcaggcttcaagcgttgggctatggaggctaactccgtattcatccgcatgacacgggagcctttctacaacgttaagaaggacatggagtatggacgtgcgaagccgtcttttgtggccaattcgctcatgagcttaccagaggaccatgatgccgacgacgaagatatcatcatgtatgcagccggaagtctctttagcgctgggacggaaacgctatccggagcaattctaacgtttttggtgctcatggcatgccatgaagacgtccaagagcgtgcgtatcaggagattatcaccgtcgtcggacgcgatctcctgccaggtcttgaacatagacagtctcttcgatatgtcgacgtattgattcaagaagttcaccgatttaatccggcagtccctcttgccacgcacagcaactaccaggaagaggattatttgggtcatcgaatcccaaagaaaacctggatcctggcaaacatctgggcgatgctgcacgatgaatcagattatcctaatcctggttcattcaatcctgaaagattcctagctgtagacgacaaaaatgcgcagcttgatccacgctccctgctgtatggatttggacggagacgatgtcctggtgcacacttcgcagatgcgattgtctacctaattgtttctcgtatcctaaccttattcgttattcgtccgaagatcaaagagggccgcccgaaccctcctgtgttggagttcatacaggcattcgttccggctccaaaaccatttgagtgcgatattgtccctcgagataacgcggcggaaatgctaggcgtggacagcgctgcgcttaatggttccacggatttctga

SEQ ID NO: 398 - DNA, 1479 bp, Stereum hirsutum
atgttggtgattattggatctgctatcgtcctagccaccttcgcgctctctctttgttttcgcccgtattcagccatccgacgcctgcctagtccggctgtaagcgagctggtatggggtcatgagaagttggtcttctcaaacccgccagggcacctcttcaggcaatggactcgggagcttggcctaaccttcagaatccgagcagcacttggtctagtacttagtgacccgctcggcatctcgtacctgctacagaagaggattttcgacttccatcacagcagagttgtccggcctcggattggacgcttactaggaaaaggtctgggctgggtcgagggtgaggccgagcatagacggatgaagcagctagtcatgccttcgctcaccgtcgaaaacatcaaaggcatgtcctacgatatcgtggatgcaacaataccggtcatgaatgacctcactcacttactggaggcgagtggtgggagcgctcgggtaaatgtccttgatttgatgaacaaggttactcttaatgttattggcagagtggctttcctccatgattttgaaggcggtaacagcccagccgcgaaggacattcttagcgcacgttcaaagagtctgtcgggaatcgcccgctattccgcgttcttgactttgatgttactacgacgattcccagttctgaacgatctgcccatccccgctctccaagcgcagggtattatgtcaacaaccataaaatcgggcattgcgcgggagatcgttcggagacatgaggaggcagcacctcctattgagaagaagagcaaagatctactcagtatattgctcacagctgttagagaaggtcgaatgtcagaagcggagctttacgaacagtggatttctagggttggaggacaagaaaccaccagctttactctggctttcagtgtcctcgagatttctcggaatccgcatatccaagagcggctgcgtaacgagctcgcaagcatcccaggggaagtgacatatgaagacttcgagtctaaactcccatatttggatgccgtgatgagagaaacgttaaggatgtatccagccttagcttacatggagcgtgtagcaaccaagtcggatgcgatcccggtccagctgccaatccgattatcggatgggcgtgtagttaacgaggtcgaggtccaccccggacaaactgtgattattcctatcatcgctatccatcgatccgtgtctgtctggggagacccggacgtctttcgtcctgagcgctggttggagcagcttccggcccagaaggacttagtgtcagggtggtcgaaccttttgagcttcagcaatgggcccagaacctgtattggcaggaaatttgccatctatgaatataagcaatcagtggagactgtacgacagccttggaggagatggaaccgggagctggaggcgaccgtggcactcaggagtctgatcaagtag

SEQ ID NO: 399 - DNA, 1023 bp, Stereum hirsutum
atggcccaagcagaatatcgccagctcggcaagtccggccttcgtgtctcagtccccattcttgggggaatgaccattggagaccagcaatggctgccttggctgcttccggaagataaggctctgaaccttctcaaaacggcctgggatcagggtatcaataccttcgacaccgccaacatgtactccaatggcgaatccgagcgtatcatcgccaagttcatcaaacagaatgagattccaaggcgcaacctcgtcatcatgactaaaatcagatttcctgtctcggaggacgatcaagtcgttaccagttttgccggccccaagtactatcacagccgcgattacgtcaaccaaggtggcctctctcgcgtcgccatcttcaaccaggtcgacgcctcgttggcgaggctccagacagaatatattgatcttcttcagattcacgcgttcgatcccgaaacgccagtagaagaaaccatgaaggccctccacgatattgtgatgtccggaaaagctcgctacatcggcgcctccaacctccgcgcgtggcagtttattgagatgaacaacgtcgcccagcagaactgctggacgcagttcgtgtccgttcaagtggagcactcacttctttaccgtccctacgagctcgagatgttcgcatactgcgactacaaggggatcggcatcctgtcttactcccctctcatggacggtcatcttgcccgccctgtaggggttactacggaccgaagcaaaatatacgaaggccatctgttggaaaagaagaggagggagtcggacaaccaaataatcaagcgcgtcgaagagctcgcgagcaagcactcgtggaagatgtcccaagttgcacttgcttggtctcttacaaaggtctcgagccccatcgtcggagctaatacatccgagagggtcaaggaagcagttttggcagggaggagactcagtcttgaggacgttgagtatctcgaggaaccgtacgagttttgcgctccgaggttctaa

SEQ ID NO: 400 - DNA, 1515 bp, Stereum hirsutum
atgtcctctttctggagaccagatgccgaactgtcccattcagaacgacccctacacactaaaagtaaatcagcgcctttatcccctgaggctatcgacgacctcaagaaaaatgaaaacagcgaatgggaacaccatccgaggaaccctctcaattggacgtcgtggaagaggtggagcgttattgtcgttatatctttatacatgtttgtaaccgtactggaaagctctgtgatggcccccgcattgccggacatcagtcggcatttcagcattaacgaccagactgtcgttgttttgacactatcgatatacctactgtcatttgcaattgcaccactcctatatgcccctctttcggagatgtacggccgtttcttggtagttcagatcaacatggttctcttcctgggttttaatatcggatgcgtgttcgctccgaccacaggagctctcattgctctacgttttctcagcggatgggttggctcggtgcctctagctttaggcggtgcgattataggcgatctattccctccggctggcagagggcttgctatggccgttttcacgatgggtggaatgatcgctcctgtggcaggaccaatagctggcggttttctgacagagacctcaggtttcaagtacatcttcgtactcctggtctgtctctccggcgtgtttcttctcattagcatacctttgttccgggaaacctacggcccagtcatactagcacgctctttccgcacccccaaagacttggaaaatacctccatggctctcaataggagggagagcatccaaaacgtgtggatcaatgtcaagaggccctttgtactacttgcacggagcttcatatgtttcatcctcagcctctacatggcgacttatgcaggcatttggtacttgatgttcacgacgttcccaggcaactcatataagtgtgttgtctcagtgctgtttaccgacatctaccacttcaacaccggaacagtgggcttggcctacatagggctcagtatcggattcgtactggccactttcgtagtcgctggggtaggcgacagagtcttcacagagcttgttcgtcgcaacggtggcaagtcggccccagagatgcgcattcctttgctcatcgtaggatcgttctttgtccccatcggcttattctggtatggctggtctattgaagccaaaattcattggataatgcctatcctcgggacgggaatatttgggtttgggatcgcacttgggattcaattctctcaactttacctcattgatgcctttgggatttacgctgcatcagccctctcagctgctgcggttcttcgctccatgttagcctttgcattcccattgtttggttctcagttgtacgagactttgggcaatggaggaggcaactcgctactcgctggaatctccatagttcttgggatcccttttccaattttgatttggtacaaaggggatgcaattaggaagagaaacccccttgacttgtaa

SEQ ID NO: 401 - DNA, 891 bp, Stereum hirsutum
atgcttcttcttctactattctcttttgggtgctccatcttggaacctaccttgtatcatgtatacactttatatctattcaccttgactgactacaagaccatttttattccgattacggttttcgcctgctctacagctcccatacattcgatctccaatcttttccatggaagcacatggatatggatgcacctactgatgtgtaatgtctcgaatcaactgagaggggagcaggaagacgccgtgaatcgaccatggagaccactgccgtcgacccggatgaccaagaggcaagccacgacgctccggtgggctatggtggtgttatgcctgctctactcttccgcctatggtcaccgattagcatacgttactgtcggccttttcatcacaacatacgtatacgacgatctagggttctctcagagtccgctcggaaaaagcttttgtaacgttggtggttatgcgactttcgagatcggcgccacaaagatcatgggtgcagaacacgagctagacactacctcacttgcgtccgtctttcttagcggcatggtgatatttactactatccaagtacaggactatcccgacatcgaaggcgacacagcgtctggtcgggtcacctttccaatttatgcacccgagttctcgcgattattcactctgtcatcgatcattatctggtccttcgccttgtcatggttctgggatatcggcatcctgagtcagtgctttctcgcaggattgggagtatacgtcggtgctcgttactatctccatcggacaccaatcgcggataaaaaatcatacaagctcttcaacgtttggctggtgctgatacatcttcttccactccacgcccgcatccgtgtgtttctctattag

SEQ ID NO: 402 - DNA, 1578 bp, Stereum hirsutum
atgaagcgcttgccttgcattgccctttcaccctacgcccatcttcctacgctgcgcatcatgaactatatgctatcctttctcgttctacttgtatcacttttgatgctcagaatcatactgaagaggaacacagacaactctggtgcccatcattatcctcctggtccgcccgcaatacccgtccttggtaatatcatgactattccgaacacgggaccatggaaattattctcaaagcttcatcgtgactacggagaacctatcttcttttggggcttagggaacagcatccttgttctcagcacaatgacttccataacagatctcctcgacaagcgaggggagaactattctcatcggccggtattgactgttttaggagaactgatgggattggatcgtagcatgccgatgttaccgtacgggcgtgagtggcgagagcagagaaagctcgcccacgttgccttgaacccatctgccgtgagaaagtatcacatcgtgcaggagaacctagcttctgtattggcgcttggtattctcacaaaccccgaaggattctttgataatgtacgactttacgcggagcgcataatattctctgtggtatacggtgtgtacatcgatggttccaataatgagtatgtcactcaggcagaagaaaccatgaaaattgtgggagacgcaatggtaccaggagcgttcatctgtgacttgttgccttggatgaagcatcttccttcgtggttgccatttcgaaagcaagcacattatgggagaagtatgattgaagcccttgtgaccaaacccttcgaacacgttcaacgagagatgatgacgaatatcgctgcaccatctctcactcgagaactattgactttgcaacgtaacgatttcgcgtcttttgagagctccgttaagtgggcgactggatctttatatggtggtaggcataacatttgggtcttttcaaagaatttttgtctcgcactgacgggaactggactgtcagcgggcggcgaaacgacttacgccaccatccttactttcatgatggcaatggcaatgaatcccgaaactcaacgtaaagcccaaaaggaggtcgatgaggttatagggatacatagacttcccgtcgtctcggacaagacacagctgaaatacgtagcagctgtcatcaacgagacaatgagatggcatcctgtgttaccgctgggcatcgctcgccgtacggaccatgacgatgtgtacatgggatacttcataccaaagaatactgttgtttttcctaatgcatgggcgctcacaaggaggcacagcgacacgtacgatccagaacaattcatcccggaacgttttatcgacccttccgaagcaacggacgatccttccacttatttgtttggatttggaagaagagtctgtccgggtaaatctctggcggagaactcggtattcattgcaatcgcgactatcctatctgccctagatatctcagaagacccggacagtagaataaccccagcatttacggaagctttagtaaggtatgattctccccgggagctctacaaatga

SEQ ID NO: 403 - DNA, 1578 bp, Stereum hirsutum
atggcgactgtcatgtattctcttctcgttacgaactgcaccgtagttcacgttgctgtgctcatttcaatcgtgcttgtataccgcaggctttttgtaggacggagatcttctcttgatccgttgccctatccagatgaagaaccggagtggatatggggtcacgaaaaacgcgtttatgacagccctccagggcaggcgtacttacggtggatgaagagtgttgggcatacctaccgcattcgtgctgcccttggtgcccctgacgttcttgttctgggcgatccgctcgccatttcttatattctccaagagaaaatttacgactaccaccatagcgctgtggtacgccctagggtggctcgcttcctgggaaaaggcttaggttgggtcgagggagaatcagagcataaacgaatgagacgtcttgtcagccctgcattctcggcgcaaaccgttaaagacatggaaggcgaaatatttcaagcgacgtctacggctagtctcaatatcgaggactcggacggtgaaattggcgtaaacatattgtcatggacaaatcgaatgaccctgaattccattggacgcgtcgcattcttgtacgatttcgaagccgggaagagccgcgaggcacagcttatattggacacaaggcggaagtcgctaaccggtattgctcgatacgcctcgttcttaactctgatgatgctcaggcggttccctgctctcaatagccttcctgtacccgcccttcaggcgcaaagcctagtcacgacaaccataaagtctgtcgtggccaaggagatcatagcgagaggttcttcaacatctgatctccgaactcgaggcaaggacctgctaagcagactcttggtagcccatgatgagcagcacctttcagtcgaggaactacatgagcacatatcgacatttttagtttctggacaggaaactacgagccaaacggtcgcgttctccatcttcgagctttcccgtcacccagagatccaacagcgtctcagagaagagttggacacatcttacccatcttctacaggcacgccgcagtcacagctaccttatctggatgccgtgcttaaggaaacactaaggatgtatcctgcccttccgtacatggaacgtgtcgcaactaaatctgatagaattccgcttcaaacgcccatcagtcacggtggagatcaggcgctacgggacattcgtgttgaaaagggtcagaccgtcatcatcccaatcatatctcttcaccgctctgatgctatctggggcgatggaagtgtctttcgtcccgaacgatggcttgaagctttacctcatgaggcacagcgtcttccagggtggtccaacttacttgcattcagtgatggacccagagcatgccctggaatgcgaatggcgatatttgggtcaaagcttatattaagctctcttgtcaagaaatatcgcatagaaagtaataactcagaagtagttctcaggatttcgtcaagtttgcagccttgggtgattgatgattcggaccaaggtccgcaagtgcctgtaacgctgcacatgcggtaa

SEQ ID NO: 404 - DNA, 1512 bp, Stereum hirsutum
atgcatcttccattcgcctggataatatcgcttattacggtcgttggagttacgtgctggatatgcaaacggtgctttgatatccggaatctctcgcttccgcctgggccgccagacaacgtgcatgaaaatgaacgcaagtggatggcttactcacggtggtccaaagaatcgggcattcaaggtcctctcgtcacactgtccacggcaccacacccaatgatggttgtcagcggacgcacagtaatccgagatcttctgataggaaagaaatcgttttgttgcaggccacgcatacctatggccgagctcatgggtagacaaaacaatgttggcttcacgtactacggaaagcgactcatcgcgatgcgaaccctgcttcactccgcccttagcctgactgaagttacttccacgtggatggaactcatcaactaccaggcggatgatctttgtagagatttcattgtgtctccggaacggttctacggtcatgttgaagccaatatacagaaactcatcggacgctttacttacggccacgagccaagtcccgagtatctacaaatggcggcccaggtgtcgcgacacactgggaaagctgtggaggcaggccgatgggccgtgaacagtattccagctcttatgtgggtaccggcatggatgcccggtgctggtttcaaaagatacgccattgatgcaagaaagctgttcacgcgcctgctcaatgaatctgttgcgctcgtaaaacagagaatagaccaaaatgaagcggacacgtcctttgttaaacaatctctgaccaacatctcgctatatccatcatgtatcgatgagtcacttgttatatcttccgcggggagcttgtttagtgcagggacagagacgttgtcaggtacaattctttcctttatcgtcctcatggcaaaccatgaagatttccaagaccgtgcatatgcagaaattctgtctgttgtcggcacagataggtttccaaattgtcgagaccgcccatcgctcatatttgtggatgcacttatccgagaagtataccgattcaatcctatcgtacccgtgatacaccgtagcaactacgaagaggaggaatatgaagaacattttattcccaagaagacttggatcctcgtcaacctgtggtcgattttacatgatcctaacgtctatccatcgccagaaacattctgtcccgaacgttttctcaactccgataaagacatcaatcccgatccccgctcttttgtttatggttttggacgaagaaggtgtcccgcagtggatttcgcggatacaacactttttattaccataactcgccttctgatggtcttcaaaatttccccggagatcgttgatgggattgcatacccgcccctgctggagattatggaaggatttactccggctccaaaaccgttccgatgtaaattcatatctcggcaggacagcaagcgcttgctattcgatccatttgacagtaccacagataattga

SEQ ID NO: 405 - DNA, 996 bp, Stereum hirsutum
atgagtacctctttaactaactacgctcttccggacagtaggatcgaggttgtgcggcttaaccagcaatatatcaggttcaagaaacttttcggacgtaccggaccatttccgacaactgtcgacgttgacggcatcgaccatgttctcgaggttgcggccggaacatgtgcttggactctggatatcgcacatcttcaagaagtctacacccgcctcccatcgatgccatcatcgactcgtcctgagtctacgtcaaagccaattcagttgtacgcctgcgatattagcacagataagtttcccccgagggacgtgacggatgcgctcggtatcaagacgtttcaacaggacgttacacaaccctttcccgacgagctttacggaaagtttgacctcgttcaagcgtttatgcttgtcggttctttaacagaggctgggtggaggagggctctggagaactaccgcagacttctcaaacccggagggtttctcttcatgctcgaaacggatgtggccctgtattcaacgagcctcccaccaccaccaccaccgcttttcccccttgacatcgacggtgttatggacggtctcacgtggattcacagtgcgaatcggttgttcaccgggttcaacataaaccgagacctggttcctaatatatcgtcccggttgccggcgctgttaacggagcagtctctcaacatcatacaagaagctaaggctatctcaccggttggaaagctctgcaaattataccgcgcgttggacggcgcagatttatctgatgattgggatgactctgttcagggcactcgggatgtttttcgtggattggctcagtcaatgcttagaagaagcatgttggaggtaccaaaaggaacacccatcacgactcaggaaggtctgaatgagcttctcgcttggatatttcaggggttggaatcggatggggcttgtcatgtgatgacacagtggataataagaaggaactga

SEQ ID NO: 406 - DNA, 1284 bp, Stereum hirsutum
atgaactctgaggataccgccgctgaccatggaccacccagtatctcgaaagctgaagaaggattggaatctactgggccttctggagaaacgcccgcttctgcgctcatctctgactttcctgaaggcggtcgcgacggatggttgaccgtgttgggaggtgctcttgttctcttttcttcattcggtgccgccctctccttcggagtctttcaagactattacactcgcatttctctaaatgaacactccgcgtcgcaaatatcctggatcggatccactcagctgttccttgattttgctgtcggcctgcccgcagggaaactcttcgacgaaggtcatttcaggcttcttatgatttcaggaactgtcttatacagcttctcgttcttcatgctttcacttgccaaaccgcataactactaccaagtctttctgtcgcaggccattggtatgggactcggaatggggctagtcatcatccctgctgtctcgataccattgcattactttaggcggaggagattacttgctatgggattcatatttgcgggctcctctcttggcggtgtcattttccctatcatgctcaacaagcttatcaacggccgtgctgggttcgcgtggggaataagggctgccgctttcttgtcgctcgggctcttgatcatcgcaaatttgattatgaagcctaggctacccctcaaaaaggatcgatcgcctgatactgtggtaccgttgaagagcatattgaccgatgtcgcatacctaatcagtgtctttggagccttcctgattttttgggggcttttcttccctttcttctatctccagctgttttcggtacttcacggagtagacgaaaagcttgctttttactcgttgacggttctcaatgcgtccacaatctttggtcgcacaattccgaatttcgcatccgataaatttggacctttgaacgttgcgatcccgatgactaccatcgccggcgggctcgtatttgcgatgctgggcgccacaagtgtcggcggaatgttcacattcgcagtcgtctatggattcttcggtggagcatgtgcctcccgcatcggtatcgcaatgtttgtctgcggatttgcaatcctcaccggaacacccatcaccggggcactgctcaaaccgcctcagtacaacacctggacgaagcccgtcatctttagcgcggtggtcatcttggctggggtcggatgcctggtgatatcaaggcagatgacggtgaagaggaaggggacgtggaaagtgtga

SEQ ID NO: 407 - DNA, 819 bp, Dichomitus squalens
atgctctttacggtatccgatctgaagaccattctactccccgtatcagccttcgcatgcgcgacagcccctatccactccttcgaccggctcctccacgccctcatttggatttggatccaccaattaatgtgcaacgtctccaaccaggcccggacgcgcctggaggatgccatcaacaaaccatggcgtccgctcccttcgggacgcattagcgaacctcaagcccttgtgcttcgctgggtgacagtcggcgccgcattcagctgctctgccatacatggcggcgatctcatgctcaccactttctgtctctttctcaccacattcgcatacgacgagctcggtcttgccgggcatcatatcgccaaaagtgtttgcaacattggcggctacaccacgtttgaaattggggcgacgaagctaatgggagcaacgcacgatctagacaacgtatcagtcaccgcagtgtgcatcagcggcgctctgatcttcaccactatccaggctcaggattttgctgacgttgaaggcgatgctattttgggacgcaagacgttccctatctacgccccagagctatgccgtattgcgacagtcatcgcaatgagcgtatggtctctgttcctagtctcgttctggggcattggaactgtgtcaggggccacatttgtcgtcttcgggagcttcgtcggaagccggtattacttcctccggagacccgacgacgacaaattgtcctacctcctatacaacatttggttaaccatggtgcatatcatgccgaaccatgcgcgcacgcagttgttcgcatactag

SEQ ID NO: 408 - DNA, 1584 bp, Dichomitus squalens
atggcgggtctcctgaacgacacgttcaactccacgccagtgcttgtcatcctcgttctcgtgattgtgtggcggctctccgcagcctttcgccgcaagtctgtgctcgagtccctgcctgtgccatctggggcagagttcgtctggggccatgagaagcaggtgtttatgaacgaaccaggccaagcatacagaaaatggaagagcgagcttggcttgacctatcgcatcaaggctgcgttcggggcacccgacattctcgtgttgagcgatccggtttcaattgcctatatcctacagaagaagatatacgactatcatcacagcagggttgtgcgcccccgtgtagctcgccttctaggaaagggccttggctgggtggagggcgaggctgagcacaagcggatgcgccggctagtcagcccgtctctgtcacctgagaatgtgaagtccatgtcgagcgacgtgagagttgccgcactggaggtcgtcgaccaattcgtcagccatgtgcagtccggagcggagaagcctgtcaatatcctcgactggacgtcgaaggcaacactcaacgttataggacgcgttgcgtttctgcatgacttccaagcggggaatagtcctgaagccaagcagatcttaggcgggagacgtcgcagtgtttctcgtgccgctaaatacgctggatttttgaccttgatgctgctccgccgtttccccatcttgaacgatctgcctatcgctgccattcagtcccaaggcctggcaaaagtcgccatccagacgggcgtagcacgcgagctgattcggcgcaatcaagacatcgtcaaaaacggagatactaaggcctcgaaagatcttctgagcagacttctggttgcacatgctgcgggagacatctctgaggaagagttgtatgagcagatatccacattcatcgtatctggtcacgagacaaccacacagacattgggttttactatctacgaactctctcggcatcctgagatacaagcaaagttacgtgaggagctggcagcggttaagggtgaaccaacctatgacgacttccaggcgcgtctgccttacctcgaagccgtcttgcgagagacactgcgactgtaccccggccttccgtacatcgaacgcgttgcgactgtgcccgacagcatccctctgggagaacctgtcaagctctccaatggcgaggtcgtaagccaaattcccgtccttcctggccaggtggtcgtcatcccatgcatcgcgattcatcgtatggactccgtgtgggaggatcccgatgtcttccgacctgagcgctggctgaaggaccttcctgcaagcgagaagctctgctccgggtgggcgaacaccctcgccttcagcgacggcccccgcaattgcgttggttatcggcttgccatcttccagtacaaggtcatcctgacctacctcttggagaggctcaagttcggagacgccggtatggacatcacgttgaagatcgcttccagtctccaagcgtgggtcaaggaccgaccggagctcggaggctgcctcccagtaaacgttgatctattgtag

SEQ ID NO: 409 - DNA, 1524 bp, Dichomitus squalens
atgacagccacgatctccgtcgtgtttgcatgcttaattgctgctatttggctcgttctccctgccagcaggccgaagcggccattacctccaggtacgcatgttcccgtcttgcgattggacggggactcacggcctcgactaggtcctccctctacagcaaaatccgctgaacatccatggaaggtttacgcgacgtggtccaatactgtcggtcctttggttaccttggggacatcctcgcggcccatcgtagtcatcaataccacagaagctgtgaccgatttacttgagaagcgcagccacttttcgtgcaagccacgatggcccatggctgagctgctgggacgtcagaagaacgtcggatttcagtactacggagaacgtttgaagcgttcacgcagagtcttacacaacgcgctgaacactaccgcaattgggaccacctggacaggcctgctgaactcccagtcggtggcattacttcaggctttccttcgttccccagagacattctatacggacgttggcgggaacatcgaagctctggtcgttctattcacatacggtaagaagccagatgcacagtacacttccatggcgagagaggtcatgcaccagactgggatcgccctgcaacctggccgatgggccgtcaacttttaccccgcgctgatgtacgtccctgcgtggttccccggtgcgggctttcagcgctgggcacaagacgcgaaagcggccttctatcgtctcacaagggagcccttctaccatgtcaagaaagaattgtcgcaaggcaatgctccgttgtccttcgtgcgcaatgccctcgaggagtctgagcagacgccggaggaagaagatatcattatgtctgcagccggcagtctcttcagtgcggggacagataccattactacggccgtactcactgcgatactgctcctgactcgccatcctgaggtgcaagcacgcgcctatgaggaaatcaagacggtggtagggacggatcgcctcccggaaatgcacgaccgcgcctctctcccttacatcgactgtgtaatacaggagattcacaggttcaaccctgcgatcccactggtcacccacgctaattcggaagaggacgagtacctcggttatcgcattcctaagaagacatggatcatggcgaacgtctgggcaatgcttcatgacgcaaatgactaccccgatcccgaagagttcaaccctgatcgattccttcctggtggaaccgggcccgcgcgcgacccccgcactttgatctatgggttcggccggagactctgtcccgggatgcatctcgccaacgcctacctgttcctggttgttgcacggactatcgccatattcgagcttcttccaccgatagaggatggtatcaccaagatgcccccgctcgacttcgccgtaggcttactgtcaactcctaaacccttccgcagcattctcaagccacgcggtaaggcggaggagctgttgggattgcacggtgaagattag

SEQ ID NO: 410 - DNA, 777 bp, Dichomitus squalens
aggctcgatgacctgaacattgctatcaaagaattcttcggaggaaagctttcctttgcgccccttgaagaccttcaacccacagcaatcctcgagataggatctggcactggcgcatggcacgtacgggctatacaagcagcagaggcattccctcaagctcgcgtggtcgcagtcgaccagaacccgataccgccccgccctctaccgtctaacatcgagtttcacaagctcgatatcaccaagggcttaccgtttgaggacgagaccttcgatatcgtgcacgcccgacttgtcttgatgcatgtgccaggggcgagagaaatccttcgccgcgctgtccaacttctcaaacccggtgggtggatcgtcgtggaagacccagacgatagccatatggtcgatcacgggaagccactcggaccgggcatgggagccttcgtaggagcgtggctcaacattctgcgctctcgcggtgcagagccctgttttggtcgttatctcgagagcgaactgaaggccatccactcacttgccgaagtgaatgtaaggaaggtcacaattccgatttcgggaaacagcgaagaccccgaggagaacaaactcgggctctcttggaaggtcaatatgctccgcgtggcccgtgacttgccgacgcgtttttccgatcagggtatcaccatggaggttgcggagaagcacctcgaagagttggtggatccagcgcgtagcatcacaacagatatgtacttctcctggtcccgtaagcgggtgtag

SEQ ID NO: 411 - DNA, 1941 bp, Dichomitus squalens
atgctcgcagttacgaggtcactcctcccaagcctgctggcgatcgtcgcagctcctggggtgcggtctatagcatgtcctgtacccgccactcctagcccatcttccttcgctgctaccgccttcgattacattgtgatcggcggcggcaccgctgggactgcgttgtctgctaggcttgcagagaacccgtctgccgtcgttggggtcattgaggcagggatattacacttgaatgaccccatcctcgacgttcccgcatcctccggtgttggcaataagacctacgattgggacttcgtctcgactccacaggtgaatgccggcgggcggaacctgtctctctcaaggggcaaactacttggaggatcgagtggaatcaatgggcttgcgtgggatcgggcatccgcaacggagtatgacgcgtgggcaaccatcgctggtgacaagagctggagttggtccggtctgcttccgtttctgcagaaggcggagaatttctccaagacgcctgccgacccgtttccgggaatcacccctgcggaagccgccgaggttgaggcagacctcccccacgtagacggcttctctgggcctatcgtcgcttcgctcaattcgctttatttcgacacggttacgaacgtgactgtgacgctcaacaaccttggcattgagaccaacgccgagcctcaaggtggcaacaccaccggagtctcgaacattcgtcttagtctgtaccgtacacagggtgtccgctcgtatgccgccactgcgtactactgctcgcacgccagtaaacctaattatcatgtccttaccggcgcccaggccacgaagatcatcttctcgaagacacgatatgggcttatcgccactcgagtccagttcatctctgacggacagcagtacactgcacacgcttcgaaggagatcgttctgtccgccgggacgatccaaactccacagcttctcgagctttcagggattgggaattccaccatactgaagagcaagaacattacgccgctcatcgatctccctggagttggagaatcattccaggagcactttttcgccgcggcgcagtggcagctccggcctggtgtacaaacgttcggtattcttcgtaataatgcgacatttgctgctgagcaacaagcgcaatacgctgccaaccacaccggacttctcgcagcaaccgactccctgacggctttcctcactctgcaggacatcgtctctcaagatagattgcaggaactcctcagtatctttgaccaggaggcaagtgcgccgggtctttcgggtctacaacagcagcagtacgcgctgcagagggagtggttcgcacagggcaacgttcccgccgtcgagcttatcctgtggagtaaagggctcatcaatgtcgagcaaggagagagctatgcggtcatacttggcggtctcatgcatcctgtgagtcgtggtagcacacacattgcttcctgcgatccgctcgcttctcccgccatcgacccgaagtacctgagtcaaaacttcgataccgaggtgctcttggacgtcctcaagttcctgcagaagcttggacagagcgctcctttctctgatttggtgaccgttcagacgaaccctgatcccacggcgcaaacagacgacgaactccttgcatacatccgcgcgagctccgctggtggagaccatctagttggcacggctgccctggctccacaagcttctggaggtgttgtggacggctcgctcaaggtgtacggcacgacgaacctccgtatcgtcgacgccagtgtcttccctatccagatcggggctcacagtcaggctactgtctatgccatcgcggaaaaggctgcacagctcatcgcggcggcagagaatgcagaccagtttgtctcgcacccgccccaccctcgttcaccccattga

SEQ ID NO: 412 - DNA, 1017 bp, Dichomitus squalens
atggcagagtaccgtcaactcggcaagtctggccttcgggtctctgtccccatctacggtggcatgtccatcggaaacacgcaatggagtccatgggtcctccctgaagaagaggctctcaccgttctaaaggctgcgtgggatcaggggatcaataccttcgacactgccaatctctactcgaatggtgattcagagagggttctcagtaagttcatcaacaagtacagcattccgcgcgagaacgtcgttatcctcaccaaggtgttcttcctcgttcacaaggatgaccctacctccgtcaccgtccttcggccagatctgaatggtacccgtgactatgtcaaccagggtgggctctcgcgcgccgcgctcttcaatcaggtcgaggcgtcgctcaagcgtctcggcacgtcctacatcgacatacttcaggtgcacacgttcgatccgactacgcccattgaggagacgatgaaggctcttcacgacctcgttgaaagtggaaaggtgcgatacatcggcgcatgcaacttgcgtgcctggcagtttgccgagatgaatcgcgttgcggacgtgaaccactggacgaggttctcgagcatccagatcgagtactcgctcttgtaccgtcctgaggaattggagatgattgcgtacgccaactaccgtggcattggcgttattggctactccccgctccttgatggtcaccttgcgcgcccgctcgatactgttactcctcgctcgaagagcgtctctgggacgttcttcgaaaaaccccggcgtgactccgacaagaagatcatccagcgcgttgaggagctcgcgaagaagaagcaatggacgatgagtcaagtcgcactgtcttgggtggcgtcaaagatcactgcacccattgtcggtgccaactcgcccgagcgtgttgctgagagcgtcatcactggcaaggttctctctgatgatgaactcaagtacctcgaggagccctatgaaatccagggaccaaggttctaa

SEQ ID NO: 413 - DNA, 1095 bp, Dichomitus squalens
atgtctgtccttaacgtttcctccgtccttctcctgctcttcttctatctcttccctgcaatcagtgccgcagcaccccaccatcccgcaccccggcagtacactacgtcctctcttaatgtcggcaacggtaccactctcgcgtatttagatagtggcgcgccttcttccaggacgtacaccactatttttgccattcatggcatgggtttccagagtcctgtctgggagaaggtcctcgatctcgcgcccgcatacaacacccgctttgttgctatcaacaggcgcgactacaacggctcaacgccgtacaccgccggcgacctgaacgtgctccagaacggcaccgtgtctgagcagacggcgttcttccagcaacgcggcgaagagatcgccactttcatcgagctgttcatcaagcagaacggccttcctgctccttccgcagacgggaagacgggtggtgttgccttgttaggctggtcgcttggcaacgcgttcggcgtgtctacgatcgccaatatacagacctacgctacttccacccagcagacgcttgcgaagtatctgcggggattggtcttgcaaggttcatggtccccgcagatcgacacgagcatcccagctgcggaccgtcagcccggcttcgtgcaatggatcactgcctacttccagcatggagacctttcgacgcgcgacgtcaacgtcctcgaatacgtcttgccgagcatcacgcacgttccgagcgtgttttcgtttacaacagatcagctcgctggagttacgaaccttgctgccgcgagtggcagtgataccttcatcgtcggctataaccaggctgcgctcctcccaacataccggaaggccttgttcaacaagacagtccgcgccgccatcccactcctgaatgtgctcgagttcaccggcgatatcactgccaacttcggtatcgtcgcgctctggcagatccaggatgacgatgctgcggctggcggcggctttgtgaagacggagatcctcaaagggacgaaccatttcgttcactgggatcaacctgcactcgcgttgagtacctacctgagtgtcttcgattga

SEQ ID NO: 414 - DNA, 717 bp, Dacryopinax primogenitus
atgctttggatctggcttcacttgctgcaatgcaatgtatcgaaccaatacaagacctgcgatgaagacaagatcaacaagccctggagaccgctacccgccaaccgcgtgacgttcggtcaagcccaatttcttcgctgggccctggtggtcgtctgcgccctattttcactcagcttcgggaccgatgtcgccgttgttagcctcgtgctcaccctgaccatgatagtttacgatgaagtcggccttgctgggcattgggctgggaagaatatctgtgcggtatatgggtacgggacctttgagatcggcgctacgaagatcatgggcgagacttcggatttggacgccaaggcccagctctcggtggtcttgtcagccatgatcgttctgacgactatccacgtccaggacttccctgatattgaaggcgatgctgccttgggccgcaggaccatcccgatcgttttccctggtgcttctagaatcgttacacccctgcttatgttgggatggaccgccgtggtggtcaacgcctggaagctaggtcttgtgccctcgacgctgatgtacaccctgggacttgttgtcgcggcacggatttgggcggaccgcagcacctcaggggataagacgacctaccttacttacaatatatggctaatctgtgcgcaccttctacccgctaacgcccgcttcggtgtgttgtcgtggtaa

SEQ ID NO: 415 - DNA, 1647 bp, Dacryopinax primogenitus
atgccattgaggatattcgacgtcatcatctctcttctcatcgtctttgtttcccgctttgtcctcgttcgtctctgggcatggtggcaggcgtatcagcttgtcaaagatgttcctggcggcgttcactggcatttccaagacccggagtcccaagttgggggtcagctcccacatttgccattgggaggcatcggagacttccacgcgaaatggttgccctattccaagactcgaacaagcgtcatagtctcgattcccttctggcgtcctgttcctatgttctgggtctgtgacactgttgcattgaaacagattgccaatgataggcacaccttccctaagcgtcccgagacgtaccaggcgatcatgttctacgggcccaatgtggtatctgcagaagggcaggactggaggcggcaccgtgacgcaacgaaggctgcgttcggagaatcaaataaccagcttgtctgggcagagagcatgcgcactgtgaaggaatggttcgaggccctggattcaggaaagaaagacatgcagggtgccgtgactcaagaagttcacggggtgatgactcggcttgctctcttgatcatctccgccgccgggttcggaaggcacgtctccttcatggcggatgaacatccttcccctcctccaggctataagatggcatttcgtcccgcccttctgaccgcagtccataacatggcgctaaaggtccttgcgccacgttgggcgtactcactgccgatcgaggtgctgaagaacacggatctggcgtattcggagctgaaacggcatttggaggagatgatcagccgaaccagagcgcagttgatgggcgacagtggtcaggggagaggacaggctgatctcttcaagcggctgatctcggcgaacgaagtggaggaagagggcaaggcgaagctgaatgatagcgagctgctatccaacacatacaccttcctccttgctggtcatgagacgaccgcgaatgccctttccttcgcctgtgccctgctcgcgatgcaccccgaggtgcagcgtaagcttcaagccgaggcggacactgtatggccagacgggctgcccgtcgacggtgcagagtcctatcgggaggatgtcaacagtctgaagtatgctgaagctgttttccgggagacgacacgtttgttcccagcggagacgaggttgagcaagatggtctcacaggacacacgtctcaaagccaggaaatggggcaagaatggtaaggaagaacattacgaggttgtcgttccccagggcagcacggcatggctggacatctgggctactcacatgagccctgagtattggggcccggatgtgaacgagttcaagccggagcgcttcttcgacaccgacacctacaagtggcctcgagatgcatacttgccctttatgattggacctcgatcatgcatgggccagcgatttgccgagctcgagggcagatgcgtcctcgcgcatatagcaagtcagtacgatatcctccttcctccggagctggagaacgcaagtgaagaggagaagaacaagaagctactgagctgggatatccgggttgcgttgaccgcgaaggatgtcacactgagatttgtcaaaagggccaatgctgtgtag

SEQ ID NO: 416 - DNA, 1314 bp, Dacryopinax primogenitus
atggctcgcgaagtagaggagctcgatgcgctcctatcccttctcacagacgcagtcggcgtggtcaagtctgcctacagcgcgcacgcccgtcaaccggagctggaggacgctgccggtcagcctacgcagctaggtgcgagcgaggagctgcatcaggctaggaggaacatcagttccgcgagccggaggacgctcctccttatggctaacagcgcttttgagacagcagcactgcgcgtagcggcaggagcctgcgtggcagatcatctcctcccccacccttccggcctgcccatcacagacctagcagcgaaatgcgatatggaggctgacaagcttgcccgtgtcctccgcctgctcgcgtgcaaacacgtatttcgcgaagtcgctccgggagtgtttgcgaatactcccctgagcacgcggttagcccggaaacatgggatgtgggacttggtgaaccacataacagacgaatgcttcaagtcctccgcctatctgtacgacgcgctcgccgcacccgtgttcaagccccctttcgcccatgcgtacaagcacgacgccgggtattgggcgtacatggctggagttgacaaaaccatgggagcacggtttgggagggcgatgctgggtgttgacatggctgaaatcggaccgttactttcccacttcccgtgggagacacccccccccggaacgacagtgtgcgacgtcgggggaggggtaggcacagtgagcctcgcactggccaaccggttctcgcagctcaagctagtggtgcaagacacgcccaatacactggcccaagcccgtctagaatggaaggaaacggcgccccaagtggtcagcgaggggagggtcgacttcctccctctggactttctgacccaagccccgaacgtggggtgcgagtattattatgtgcgttgctgttccgctcggcttaggagcgatgagcggagcgaagctgagcaaaggcagctcaagcatgtggttcatgattgggcggacgaggaggctgtgaggctcttgaggaacgtaaggcagtccatgggcgctcattctcgcgttctgatacacgagttcgtcatccagcctctcttccctcctcccaccgaccctcgagaaggaacaacatcatccgccccttccccaagcctggcacccgacagctcagcgctacacgcccaccacctagacctgacagtcctctgcctcctagggaccaaagagcgtacgcagggggagtttgagcacctggcgaggaaagcagggctagggtttgtcaggctttggaacctaggagagtag

SEQ ID NO: 417 - DNA, 393 bp, Dacryopinax primogenitus
atgactgcggagcacgggacgaagtatttgttgatccatgatggacctgaggcggaacggctcaatcggcaacatgagcgcctagaagcactcttcgatcaccgacttttgcctgaggggcttgagctgaaagcggatgatagaatgctcgactcgggtactgggactggcatttgggtctgcgaggtcgcctcgatgcctactgtaccggagacagtacacatagacgggatcgacatcacctcgcatcttttcccgatctcgtttccccccaacgtgcacttctcgatcgagaacatcctccacctgccagagtcggcttattccaagtatgcactcgtacatcaacggttccttgccgctgcgttcaacgggatcggatcgtctgcttaa

SEQ ID NO: 418 - DNA, 825 bp, Dacryopinax primogenitus
atgactgccaaggggaacatcacaaaatatgccctcgtgtctgacgattcggaatcgcacaggctgaacaagcaacacgaaacagctaagagtatccttcacgggcgattgctccccgatggtctggatttgcaggatggcgatcttgtgttggattcgggcacaggcacaggcatctgggcaatcgacgttgcatctgatctgccgaagagtgtccaaatacatggcatcgacatcaccccacgcctcttccccgcttctcctccgtcaaacatacagttctccgtggagaacatcttgacgcttcctgaatcataccatggaaagtatgccttggttcatcagcgctttcttacggcggcgtttgggggagaagagtggaagacctgcatcaagaatgtctatgcagctctccgaccaggcggctgtttgaaattggaagagatccatggctacctccaccctgatacattgccctgtatgcctcaggtgcaggcgttcaccaagcacctcgaaaagctaagggggatcgacttccaggctgtcccgaagatccacgtttggctattggaggaaggatttgagagtgtggtgatcgagccgaagaggtggttctatggccccgggaaaccccatgagcatgtccgggataacctgctggttgcatggggagctgtgaggcgggccacaaagcaagctgcgacggactggggaatgacggacgaggagtgggacgagtttattgctcatgtcgacagagatctcaaagagaacgagtcgtattcaatagtatacagcttcactgcacggaagcctcccatttag

SEQ ID NO: 419 - DNA, 1680 bp, Dacryopinax primogenitus
atgctcaccgacgccgctctcgctctcttcctaggctatctctgctacgtcctgttctcccgctttctctccctccgccaggtgctcgctctcttccccaatgtaccttccggcgtccatctccagtggacacatccgcagttcttccttgctcctgcgttgcgacactatccgcaatgggacgtgggtgactacagagcacaaggactcccatacgaaaaggcaggagtgagtattatagccgccacgcctgcgttctggccccaccccaacgtctggtgctgcgaccccgccgcactcaaagtagtaggtggcgaccgcgacctcttccccaagcagaccgagctttaccacgtgataagcttctacgggccgaaccttgtctccaccgaaggcgcggaatggaagcgccatcgggatgcgtccaaagccgcttttggggaggggaataaccagctcgtgtggagggagagcattcgggtcgtgaaggagtggtttgacgcgcttgatgttcagcagagcggggggagtgtagaggtggacacgcatgagcatatgacccgactcgcactgctgatcatcacctcggccggatttggtcggtacatccctctctccgtggcctccgcccccgcctctgcacccagcacctcctcagggaaggatgcgatttcccgcatcccgccaggctttacgtacccttttgtctccgccctccttacctctgtgagcaacatgaagttccagaccctgcttacgcagtatccgctgctcaagcccctcccctttcgtgcgctggaagatacgaaaactgcgtatgcggacttgcatggctatctccgggggatggtcgaggagactcgggcgcagatggctgaggaaggagaggaagagcgagggcgggcgaagggcgagggcggggaggcggatctgttcaagaggcttattcgggcgaacgaggatgagggagatgggacaggggatactgatgttcatgcggtgcaggtcttcctcctcgccggacatgagacgacagccaacacgctcgcctttgcctgcgctctactcgctctcaacccgtccgtgcaggccaagctgcgggaggaagcggattccgtctggccttccgtctcttcgctctcctctgaaatcgccttccagagctatagggaagacatgccccgcctgaaatacgccgaagcgactttccgcgagactctgcgtcttttccctgccgaagtgcggatcacgaaacgcgttgcaagagatacggtgctaagaggaacatatctcaagaccggggagaagtatgatatgcccgttcccaaggggacggtcttttggatcgacatctgggcagtgcataggatgaaaatgtggtggggcgaggatgcggaagagttcaggccagacaggttcctcgatacagcagagtataagtggccccgagacgctttcatgcccttctccctgggagcacgcgcgtgcataggcgcccggttcgcaacgctagaggggatgcttattctgtccctccttgtgcgggaatatgagatctgcctgacgccggagatggaggctttaccggtggaagaacgcatgcggcagatgctaagctggaagattggggttgccatacaggccaaaggagcgaaagtattgttgaagaaacggaagtag

SEQ ID NO: 420 - DNA, 774 bp, Dacryopinax primogenitus
atgtcctcccatgggactgatgaagagacgaagtatctactgggtaatgcggatacacgtgagagcgaccgactagataaacagcacaggatcatccaggaccttgttggtcctcttcttccggaggatctcaagctgcgaaaaaattatcatgtcctcgattcaggagcgggtaccggtgcatgggcactcgagctacactcgacgctcaacccacagacgtacgtcttcatcacaggcatcgacatcaattctcgattctttccggccagcccgtcaccaaacgtcaactttgtcgtccactcaatcatggtcctccctcccgcctggaccgagcgtttccggtttattcaccagcggttcctgagcgccgctctgtcgtttgccgactggaggatcgtcttcgatcaaatgcatcgtgcactgctcccgaagggctgggtcagggtggaagaatttagtgccacattgtgccctacgaacgtctccgcccaaaagctgccttacagccatcagctgctggattacgccgggaaattcgccaagaaggcgcctcttcgtatgggccccggcgacgagtacagggggatgcgggccaattttactaatatctggctgtatatacgggacagcatgaaaggccatcctggcgcaatgaccgatgcagacttcgaatcgttaatggcgaatctaagcaaggagctggaggagaacgacgtcggctggaacctgcacattgtcactgctcgtaagccgggaatcgcacgtcattga

SEQ ID NO: 421 - DNA, 729 bp, Dacryopinax primogenitus
atgaacgatgcttccacgttgcaccgctctgctcttgaaccgccctcaacgaccagcatgccgtcctacacgattgtcggaacgccgttctctaccttcacccggagtatcactcttggtctgcagcacaaagacatcccgtataagcaagtcgctaccacaccgcattccgatgtcgcatacaagaaccatccctttgggatgctgccgactctgattattcacgggattgggaacagcgatatctacctctgcgagagccaagcaattgcgaggtacattgaccgtgtggcaccgttgccgtctctcgacttggaacccggcgaggcagggatcgcggtgccggagaagatgtgggagtttgtcagtttggctgggtctcagggtttcccggccgtcgagatcaaggtggtcaagcaccgcgttcaagcgattgacgacggcaagcccagcgatgccgaactcagggagcacatcaaacacggagtagccaaccttaagctcttccttgcacgtatggaggcgcttatggctcccgaaggctatgtctacgggtggaaagtgacctgggcggatttcttcctcttccctctcctgtcggacctgaaggcgaccccggaaggagagattttgagcccgaggatgctcaagtggctcgcgattatggaggaactcaaggctgtgaaagatacgactgcgggcacgctgtctgttggtgggaggccgtag

SEQ ID NO: 422 - DNA, 588 bp, Dacryopinax primogenitus
atgtcactcggcttaactgagtattgtccagtctacgcgccgttctttggtgcagtgggatgcacagcggcgatcagcctatgttcgctcggtgctagctatggaactgcgaaatccggagtgggaatcgcagccatgggtgtacttcgacccgacttgatggtgcgggcatctgtgcccgtcgtgatggccggtatcatcggcatctatgggcttgttgtatcagtcgttattgccggaggcctggggtacacgatgcccctatataccggctttgtccaactcggcgctggtttctcagttggtctgtctgggttggccgccgggttcgccattggcattgtaggtgatgctggtgcaagagggtttggacagcagccaaagatcttcgtcgggatgatcctaattctcatcttcgccgaggtgcttgctatctacggacttatcgtcgctctcatattgaccactgctgcgacttctggggatgtcgctaacgctctccggaggaaggaggatatcgtactgacttgctatatgcgcgaggacgcatctgccctcgagctcggcaaatcgctggcccatgcatga

SEQ ID NO: 423 - DNA, 3075 bp, Dacryopinax primogenitus
atggcatcctccgtcgcatcccactcccgccaaatatcccaaacttcattcacaacaacctcatccacaggtcaatacgacgactacctcacagtacctcaacaatacgactacgcatccgagtcctcatacggttattcctctccaggggactctccttccccagcagcggacaactcccccgaccagccattcctcgaaggcgctgtatccgtccgcaggagcttgagcgcttcttctgcccagacggggaggagagcgagacacgtttcccaggcatgtgatacttgcaagctgaagaagacgaagtgtgatgggggaaacccttgcacttggtgcgagaagaataattggaaatgtacgactacgagtaaggataatcgcaagacgccgagtaaggcttatgtccagagcttggagagggaagcggcgaatttgaagcatcgggcagaggcgagcgcgcggttggcggaggggttgaagcagaagaatatcgcgctggaggaaaagttgcgcaatgcgggattgtgggatgggttagggacagaggggaagctgacgatcatgattccccctgctactgctgctcctaggcaggaaggggaagacgcagagttactaggcatgggggagaagctcgttcgtgatcgatctggctctcttaccgcttacgccggtccgtcccccttggcgcatctagcgacatcccccccgcccggcatgccctcccctcccctcccagacccccagcagcccaaactcgggtggagcagtataaccctctcccccgaaatacaagttcaagccacgcgcaacttcttctccttatcagggacagagtacctccctctcgccgcccaaaccctgcacatgctcgaatggggcctctctccctcttcccccggtgtcggtgtgcaaggccccctcacaccagcatactacaattccttcatggcgaacgcccttctcttcctacccccacacactgtcctccccagcgcgaaacaccagtttgcggccgcgagccagcacccgcccatcttccaacaccagtctctggggaacgtgctctcccttggcttgctggcgcagttctcggctcaggaaggggagtacgaccttggctggcagtatgcgggtatggccagccggatgatgcagtcacttggcctgcacctggatttcgacaggaaggaaaaagatttcgcttgggcctcgctttcgacgcaggaaaagcaattgaggaacatcgtctactggatcgtatacattcaggacaaactgtggtacctctgggtaggacgaaccactgctgtgcaggataacccgcgtatccccctgcctgaagtagagggggagaacaacgagcccatgttggtcttccgcgcgctgtgtcagcttatgcgcacagcggggtgtataatgcctgacgtatacggccctgacctcagtacagtggcaattgacgcccaccggcttgctctagacgcgtggcttaacagactcccggacttactgaagccaacaccgaaagcgatggacactgcctccataagcctcaggcaactgcatatgacctatcactggctgagggtcttgcttgatcggccgtattataaaccgatcacccatcaactggcgcaggaaacgggggttgggaggacggatgctagcttgaggcagatcatggttttgcttggaccttgggattcgaaggttcaggtgaacaagagcttgcaagctgctgctgctcctggcgctgctgtacccgctccactccctttaacgccactgctagcgcaaatcgtgctcaccaccggcatcacatggctgcacagcgccgtctccttccacaaattcagcccaaagcgaaaagcagaaggagtagagaaagccagagtttgtttgagggtgttgcacgaagctggccagagggcgtttggggggatgttgaggaggttgatgaggcggtattttagtagtgttgagatctcggaccgggaggggctggggatccaccttcgtccagttccggggttactcccccccggggggataacggtgcctgtgctgccacaagtacagatgtcacctccggaagaaagtttcccaacttcctccactccgggccaaacgctcttcacacaagaaccgggctcgttcgacccttctccctcgagcacgtcgctgccatcactgccagctcacactctctccttcccccctgacttgctctccccacctcaatactccccttcccccaactctgcgagcccgatccccagtggtagtgtgctccatacgccgctgtcggggtatgcgcagctccaaggccaggggcaggggatggggcaggggcaaggactggggatggggcaggggcagggacaggggctggggtggacaggggacgcgaacagtaggatgatgcggtttatgcatgagtatatgagtgggagcttgagtggccatggctcaggcgcaccggggggcgcgggggcgggtggggggccgggagtgggggaggaggctggggcaggggaggaaggagaggggatggggatggggatgggggggatgaacccttatgttccggaatgggtgcagcagcagcagttgcagcatgcgaatgcgaatgcccacgcccacgcacatgcgaatgcgaatgcgcagggccaacaagcgcaaggacaaggccaacaagcgcaaggacaggcgcaagggcaaacgcaggggcaagggcaggagcagcaatccggacaagaaggcgaaccgatcaactacagcgttttccaagaacctgaagactacagtatggacggcatcacccccgagcatatggggatagggatgaacatgcctatgggcctaggtccggggatgagcgggatggacctgggcatgggcatgggcgtcggtatggaggggataggcgggatggacatgttagatccagcgagcgcagagttcaggcagcattatgggcagaagacgatcgtccctgaccggcttgatcggctggatcggcttgatcggcctcagagggggaggagtccgtgggatctgagcgcttag

SEQ ID NO: 424 - DNA, 1044 bp, Trichoderma Virens
atgactcaaaaattgacttctctgctggttactgccttgactgtggctactggtgttatcggtcacggccacgttaataacattgttatcaacggcgcctactaccaaggctacgatccaactttgttcccatatgaaccaaatcccccaatcgttgttggctggaccgcatctgatactgataacggtttcgttgctccagatgcctaccaatctccagacattatctgccataggaacgctactaacgctaggggtcatgcttctgttatggctggctcttctgttttgattcaatgggtcccaattccatggccacatccaggtcccgttctggattacttggccaactgtaacggtgactgcgaaactgtcgataagaccactttggaattctttaagatcgatggcattggcttgatctccggcggtaatccgggcagatgggcttctgatgtcttgatcggtaataacggtacctgggtcgttcaaattccagctgatttggagactggtaactacgttttgaggcacgaactgatcgccttgcattctgctggctccgttgatggtgcccagaattatccacaatgttttaacctagccgtcactggtactggttctttgcaaccaaccggtgtcttgggtaccaagttgtaccaagagtccgatcccggcatcttgttcaatatttacacctctccattgacttacaccatcccaggcccaactgttgtttccggtttgccatcttccgtcactcaaaggtcttctaccgctactgctacttctatcgctactgttccaggttctgtctctaccggtggtacttcttctaagactactactgtcccaagatctacctcctccgctactactagaagatcatcctcttctgccattactacctctgctccagctggtccatctcaaactttgtacggtcaatgtggtggttctggctactccggtccaactatttgtgcttccccagctgtttgttccactttgaacccatactatgctcaatgtttgactagataa

SEQ ID NO: 425 - DNA, 2091 bp, Trichoderma Virens
atgaaggacactgacattgctgttggttacctattgcaaggtaaaagagattggttcactgctgccgttcatccatctccatcattgccaaaggatatcgccaggaccttgtctcgcaatactactttgaaaatgccaatccgcgttttgttggctttatacccatgctacggcgctagattggctggttctggctcttgcttacaaaaaggtaagggtaaagctggtggaccagttgtcaggatcactccaaacgaattgcatttctctgaccccgagttccattccgaaatttactctggtcacaagaacccaaaagacaaatacgctcccttctaccacttcactggcgctactcaatccgcattcgagactcacgatcataagttgcacaattccaggagacaacccttgatgtccgccttctctaagaggagcattgtcgctatcgaacccctgatcttggaaaaagtcaatatgctgtcccagcgttttgaaactgcttacctgaacaagaccgtcattaagttggactccgctttcagcgctttgactgccgatattacctctcaatacgcttacggtaggtgctttggctatctggaagataaggacttcaaaaacgacatccgcgaatccctgctggcctctttgactctatttcatattgtccgcttcttccccattgtcatgaagggcgctaaggtcttgccattcagagtcgtccaatctttgaaccctatgttgagcaaagtcctgggtttgaggaaactgatcaacgctatcactatcgaggaactgcacactatgaagcaaggcaagacttccgacgcaatgttgattcaagtcctgaataacccctctatcccagaatctgaaagatctctagagcgtctgaacgacgaaggcttcgtttttatgaacgctggtaccaccactggtaaaaccttggctttcatcatgttccatctgctaaaggacaatggcgcctactactctgtcttgcaacaagagttgatcaagactttcccagaaggcatggaaaggttgacttggaaggacttggagactttgccatatttgaggggcgttatttacgaaggtctgagattgtctattggtccattgactaggttgcctagagttgctcccactgaacccctaatttaccaaggtagggctattccaccaggtaccggtatttctgaatgtaattactttctgcatatggaccccgttctgttcccaaatcccgccaagtacctaccacaaagatggattaccgctgaagaaaacggcgagaggttgcaaaagtacattgttactttcggtaaaggtacccggcattgtttgggtatgaaccgcttgttgttcaacaaagtcaccaccccggagttggctaaagaactaaacagaggttcatccgaccatgaaatgtctcactcctggttaaaagctttcatgccaaggcaggctggtcaggatttgttcgttaacaccccattcactattaaaccacccgctactttggccggcggtttgggtcaaaactctattcatgcttcctttttgcagtctttggacgaggatttcaaggagtactacaacttgtctttcgcccataagccacccggttacactgccaaaatcgctgatatttgcgctgctccaaagagatccgatgctcaaacctccccatttggtttaggtttgtacccagtttacaccaactttcacactaccgtttgtgtttctggcattgagaacgtctctttgcaaggctacgatgatgcctggtctgtgattaagtggatgtactcccataacttggagctgaacactttgtctggttctatctcaattggtggtatctccgctggtggtcatacttctgaagtctgtcaccagttggtgagagatactagactgctgctaaaactggacaacattgtccctaaatacgatgcccaacaaaggggtatcgagaaccacttgaggttctttgcttctcccattgatggcgatctgcgtggcgtttgcaaaactttcgttgctaccgctaaatttgatttagtttgggacaagtcttag

SEQ ID NO: 426 - DNA, 960 bp, Trichoderma Virens
atgaacgaagaaaagaagttgagatccgattctttcgtcggcactccatctgctgtcttgagagaactggatgttaccgtcagattgctgaagtctaacgccattggtttcctgtttatcttcatgggcggtttgttgtccagggttgttcagaccccattgtctttggctaagactatcccattgttgaccgagactgccatcttgtggatcctatgcaactacgttttcgacatcgctaaccaaacctcttctccagacgaggactacattaataagccacacaggccaattccagccggtttgattaccattaagcaagccaaaaccagatgggtcttggcatggactttgggtccagttgccttgtatagactgtttggtgtctggccaatgttacacttgctgcattgggaagtcctaattaccgtttgttacgtctggcccaagtggttctcctggttcatgaggaattactttgcctccttctcttactgtatcctgggtaggttgttgaactccgtcttggccaggaatgtcgaagcttggaacatctccttcgctattgattgttccatcttcgtctggtttatggccactattcacattcaggagttccacgacctggaaggtgacagaaagtccaagaggaagactctaccaatgttgctgtctgacagaggtattaacgctctgaggaccggtacttccttgtttgtcttgacctttgggacctgcttgtgttatatcggttacaaggtcatggacaaggacatcaagatcgctccaatcaccggcaacccattgatgttcgttttcaataccgaaaccgcctctttgatgtctaggtactactacgtcgcttgccaacatccatccgatgtcaccctgtcccatgatgctgaaggtaaacagatcatcgataccttgtgcaatctgttttttggtgttgttgtttga

SEQ ID NO: 427 - DNA, 690 bp, Trichoderma Virens
atgggctttactgacttgttagctgacacaggcttagcggtacttaacaactggttgctaacccggtcgtacgtaaccggatatgctcctacacaggcagatgttgcgtgtttcaaagcactccaaggatcaccggactcagcaaagtatccacatgcagcgcggtggtataagcatatagccacattcgaggatgagttcagtacgctatcgggagacacaactaagccgtacacagcatatggaccagatttcgcagaggtgacacttaatgcaaccaaagtcccggccgcagaagagaatgacgatgatgtcgatctctttgggagtgatgatgaggaagaagacgctgaagccgtgaggataagagaagagcgcttagccgaataccgcaaaaagaaggaaggaaaggcaaaaccagccgccaagagcgttgtgacccttgatgtaaagccttgggatgacgaaacagacatgatcgcattggaggcagctgttaggggaatcgagaaggatgggttggtctggggtcagagtaagttggtcgccataggcttcggaattaaaaagctgcaaatcaatctagtcgtcgaggacgacaaggtgagcacagacgagcttcaggaggagatccaggagtttgaggactacgtccaatccacagacgtagttgccatgcaaaagttgtag

SEQ ID NO: 428 - DNA, 1794 bp, Botryotonia cinerea
atgccctgtcacgtcttgcaagttgcggcaggtacttacgatcttcttcacggcatcgcaaccacaaccccttggtctgccagtatgatttttttattacttttgaccgcgttctttggctcatatgagagtttgatcagtgcctcaccgctgaagtcaacttgccgctgcttcccaggcgattcttgctaccctgatactacagcatgggacgccttaaatgctacggttggagggaagctcattgcaacagtacctatcgctgcagtgtgtcactttgatcaatttgtggcctatgacgaagcagcatgtgccaccttgagggacaactggttctatcctgagacacatctgccttctccgtcttctgccatggcctggctgttcacaaataacacctgtaatccgttcctttcatctacaaccccatgcactttgggcaattatgtgagttacactatcaacgctaccacaagcaacgatgtgaaagaagccatcaattttgccaattcgaataatatccgtctggtcatccgcggtactggccatgattataatggtaaatcgacaggagccggtgcactctctatctggacgcattatatgaaattcatatctctcaatgagtcgtatgagtctcaggcgtacaccggaaaatcagtagttctcggtgcaggtatctcatctatcgaagcttacagatttgctgacgcgaacaacggcttgattgtgggagggaattgtcccaccgtctccttggcagggggctacactcaaggaggagggcatggtccatttgcgaccaagtttggtcttgcagttgaccaggttttggaatgggaagtggtgacgagtgaaggagagctattgaccgcaagtcccacaatcaattctgatctctattgggcactctctggtggaggcggagggacctacggcgttgtattatcggtaacggtcaagtttcatccaccaacaagcatactatcttcagcaactttgcagtttgctcctccagccacagggaacgccacagcatactggaatacagtcaaagtgtttctaggatctctgccaagtttggtagatggtggcttgcagcttggatggactcttacacccgaagttttcttgatctccccagtcacgggttttgacgtcgagcaagccaagattgacgaactttttgcgccaacgatatcgtcccttgaagcagccaatatttcgtatgcttacacttcttcggtagccaccagctttctctcatattacgagtccggtggcttcggcgccaatgtctcgaatacaaaccttgctggccgcttactccctcgttcaattgtccaaaacagcaccgatagcttcatctccattctccaaacaatcgtcaacaacaagcttatttttgccggcgtcaccttggatgtaaatacacctgtagtagccaatgcgccagccatctccataaatccttactggagacaaactcttatgaccggcgtcttcggcgcctaccttgattataccgacatcgaacaaggcttccaaacccaagacttcatgactgataccatcatgcctgccttggccgccttgacgccaaacggcgccgcgtatatcaacgaagccgattttcaacagccggactggcagaatgtgttttatggtgagaatttcaatcgcctgagtgatataaaagcgaagtatgatccccggcaaacattttacgcgctgggggcagtggggagcgagaagtggacagaaagatcggatggacggctttgcagggtttag

SEQ ID NO: 429 - DNA, 879 bp, Botryotonia cinerea
atgtcacagcttactagaaatatcccgagccttcaactaaagaatggctccgcaattcccttgcttgcttacggcactggctccgttataagcaaagcagcggatgacggcgccactgacgtaaaaatcgtcgaacacgtccaatcagccctcaaacttggctacacgcacatcgactgtgctgaagcctacaacaatgagcgtgaggtcggcgtcgcgatccagcagagccaaatagctcgcgagaagctcttcgtgactacgaagacactgggtttccagcccattgctcaggcgctggatgccagtttgcagaaactgcagctcagttatgtagacctctacctcatccacatcccttggctcgagcccacgcgctctctccgtgacgtatgggccgagatggaagccgtcaaagcttcgggaaaagcaaaagccatcggcgtctgtaacttcgccatttcacacttggagactatcatagccggtgcaagcgagatcccggcggttaatcaaatcgagtatcacgcttatctccaacaatcagagctatccgcgtactgccagaaaaacggtataaaggtagaagctttcgcgtcactagcaccgtggattaccgagggcccggcgaagggagtagtggcggagcttgcacagaagtatggagttggagagacggaaatttgcttgaggtggtgtgtgcagaagggggtgccagttgtgacgacgagtttgaaggaggagagggtaaaaggttatctaaaggtttttgattttagccttgaggacaaggaaattgaacagctgtcgagtgttggggcgagccatcatttcaggaagtattttgctgacaatttcgctggggaggataaagcatag

SEQ ID NO: 430 - DNA, 1641 bp, Botryotonia cinerea
atggcattaatacctgggcactatcttattgctgctgctgttagtggtatcgcagcccacttatgtgccttcatacacggagattggcacttgcatattcctcaggttatcttcactcattgtgctggctatgcgttacttttactcaggcttagatatcaagaattgagcatcatagactcgatccaggcatcgactgtcttatctgcatgctatctcttattcttgttcaccagcatcatcgtctaccgcgtcttcttccatcgattgcggaatttccctgggcctcgtcttgcagcagctaccaagctctggagtatatgggaaacaagagattccagaaaccatctgttgatgcaacggctatttgagcaatatgggccaatagttagaacggctcccaatgagctcacggtctttcatcctgaaggcgttgaactcgtgaaaggaggaaaaaatggaacagatcagtataacgagaagggtgtttggtatgatctaattcatcccaaaacatcggttgtgttcaaccgtaatccttccgagaatgccgttcgacgtcgtccttgggatcgagctgtttcacccgcaagtcttagaagttatgcggcaaacatagtagcccctgccgcggaagttctggaattcgtttccaatgcccaaggcgaacccgtcaatattaatgaacttatgaccggactcatctttgactttatgagtgtgatcgtcttcggtgaagtctctagcaaaaccgatgcagaggagcaaattagtacgctgcgtagactcaaaggggcactcattttactagcaccatgcggagatagtgtctggccagctctttttgccttcaactttcttcagtttttgaaaccggtcaaaagctggctaggtcttgtagagtcatgccgcgcacgtatgctgaaacgaatgaacaaaaaaacaagcacagtcgatgtttcaggctttttccttaaagatttctacgattcggctggggaaactagtcttgagaagcgtgagaatgcgctcctcggaaacactatctctgcactggttgctggtagtgacaccgcacgtgctgccatgattgggatattctatttcctgtgcaaaaacccaggaaatgcggatgaaatttacgaggaactaaaggatgttgatgaaaaagattcgacggtccttgcaggcaaaccaatcttgaatggctttataaaagaggctctgcgtgtagctcctccttcgatgactggtcttgctcgaatcataggtccacaaggcttatggatcgacaataccttcattccaccaggagcccaagttaccgcaccatactacaattcccatcgcttaccttctgcgttccaagatccaacagaattcatcgcagaacgctggacaagccgaccagatcttatcaaagacaagcgcgcatacgccccatggggtgctggtcaacatatctgccctgggaaagcgctcgccaacgtggaattacgttatgtgacggcgcttttcgtcaagacgttcaaaatcaagttcgcgccaggtcatgacccggagaagttttggacagatatgctggatcaagtaacaatgcagccgggagaagtatggtgtgtctttgaaccacgaaactga

SEQ ID NO: 431 - DNA, 981 bp, Botryotonia cinerea
atgagatccacagatcgtcctacgccccattcagcaattcagaacccctcatgggcaatggatttcatgcatccctttctgcaccgtataacgttgttgtacaagattgccaaatatttctggctgttcacggagagtgattttgccacttttgtaattccaaacaccgttttcggggtctgctctgcaattgcgggctatcctgtggtatcgacgtctacaacaagtggggcggtcttaagaagaattcctgccgtcatctttttcaattggtcaaatctccttgtttttgacttggctaatcagcgcctatgggaggccgttgaagaagataaactcaataagccatggaggccaattccgagcggcaaaataagtcgctccgaggtcaggcaggctatgcagatggtcatcccacttgtactcgcgctaaaccattattttctaaatgttggggctgaaacggcatgtatattgaccctcacctgggtatacaacgacttgaaagcgagcgatgatggatggatccaacggaactttattatcgctatatcttttggtgtgtacaattggagttcgctaaaagtcgcaattggggcgggagggctttcatcaacagcggagattaccagagtcggtctgtactggatcgctttgatgagtggtgtcatcctcaccacaatgcacatacaagatctgaaggataccgtcggagacaaggagcgtggtcgccacacatcaccgctagtccttggggaaaaagttgctcggtggacgctggtcattcctatcacttgctggggacccatttgcatgcattactggaaactttcttggatcatgaacgttccggtcacagcgctaggactttatgtggcatggagatgcatttcgtaccgtgggaacacggaggatcgaaagacatggcaattgtggtgcggatggaccgcactgctgtcgctcatgccactccagatctga

SEQ ID NO: 432 - DNA, 1380 bp, Botryotonia cinerea
atggcgaatcatattcttgaatcgaggggtgcaaagcgtgttggaaagctctggacgcatcgattcgtaaagcgtcgaatcgaattaaagacgcgttttagtcgtgtttatgactttcaaagggctctctgcgaagatcctaaacttattgagaagtggtttcgactagtttcgaatatgcgagcgaaatatggtattctcgactgcgatttctacaacttcgacgaaacgggctttatgatgggtataatatgccccggaatggtggtaactagtgctgaacgaaatggcagaagcaaggcaatacaaccaggcaatagagaatgggctacagcgatcatatgtggtaatggggagggtgaaactatacccccatttctagtggttcaaggacaggtccatctttccaattggtataccgaaaccgattttcctgcggattgggctattaagcctacatctaatggatggacaaataacgagacggggttagagtggttgaaacacttcgacaaacatactaagaatcgaagaaagggcaaatatcgaatgttggtgctagatgggcatgaaagccacgaatcaagagcttttcaagcatactgtgaagagaacgacatcatatgtttatgtttaccaccgcattcaagtcatctcactcaaccacttgatgtaggttgctttggtaatctgaaacgttcgtatagcggtcaaattgatgggtttatcaaggcgcatatcaatcacatctcgaaggttgagttctttatagcttttaaggctgcgtacgaagaatcaatcacctctcagaatatgaaatcagggtttcgaggaacagggttaataccatttagccctgaagctgtactttcgaagttagatattcgaattcgtacacctacccccccctctttcgatctagatcaatggatctctcaaacccctcgcaacccaactgaagctctttctcaatcaacattagttaaatctcgaataactcgccatcaatcaagctctcctacacctatatttgagactgtactagctctagctaagggtacagagagattagctcatgagaatacacttttaaatgcagagattcgtacacttcgggcagcaaatgaggcattaagcaaacgtcgacgcgcgaaaaaaactcagttacgtcaaggaggagtgcttactggacaagaggctcttgatatattatctcagcaagaggttgatattcagattcaacgcgacgagcgtcaaaataagggaaatcctattggggaagcatcttcgaaccggtgctgtagtaagtgtggaaaatccggtcataattcaagaacttgtcagaacaatgtaatagatcctagattactggattcttaa

SEQ ID NO: 433 - DNA, 1167 bp, Botryotonia cinerea
atgggaaacacaaactcgcatcccaagcacttgggtgccttaacgtcgccaaaaggtctagggaatgttgttaccatcgttatcttcgcaattctcagcatcgctgctgttggcttgcgaatctggagtaaagtcgtcatcagacgtgctttccgggcggatgactattgcatcttcgttgctctgtactccatttcgaaatcgtcgttttcgtcagctaatcaaactttagctgttgttccaggagctttaggctttcatgtcgaagaagcgttgaaatatttgggacccgattcacttactgttaccttgaaagccttccttgcttcatccccagtctggatcatctcgaccagtttggtgaaaatctcgattttatcgttttatacaactatcttcccttcccggacgtttcatatcatcgtctactcgattattgccgtgaacgctgtgtactgcgtgggctacatttttgcatctctgttcatctgcacaccatttgctttcaattgggataaaaccttaacgaatggaaaatgcggcaacacgcttcagctggagattagctctgcatccatcaacatgatctttgatctgatagttgtctttctccctatgccaacgttatggagactcaagatggctgtgagaaaaaagctatttgtcagctttatcctaggtcttgggttatgcatttgcgtcatgaatataactcgtgttgttctcgagacgcgtcaagacaatgtcgacttcacatacggattggtatacgcaggtcttttcgctggcttagaaaatggcatcggcattatcgtcgcatgcctaccaacctatggtcctttgatacgagggcgagcaaaaggattcaacagcgctgagccggaaagctacattctcaatcgcaaaaactcttactttcagaggaagacgaaagaatcctcttatacaactaccatggcctcattcgacgaagaaggctttgaaaggttgcatgaaaatatggatggcgttccactgaagagtctgcagaacggaggagtaggagcccaaagttctgcatgggtagccgttgactcccgcagtgataaatcaaccctgaacttcggtgaatctgaaggtatcgcggtaaagaccgagctcaaaatgacgagctcaggagtgccatga

SEQ ID NO: 434 - DNA, 423 bp, Botryotonia cinerea
atggctccactcactctcagcgctttccactggcgaaagaagggactcactccagaggaattcaagaaccactatgaaacggtccacatccctattctccaagaaatagctggcgataagttcccaaagacgcacacaagacattatgtggtccgaaccgctgaaggagccacatctgatgacaagtccaactcgaactacaaagcaagtgtttatgctggcacgaactccgaggatttcgactacgatgtgtatagtgagctcgtcttcgaggacgaggcaagtttcaaagcctttgaagctgttatgtttgatcctgtcttgggtccgaagatcaatgaggatagcgtcaagttcatagaccacgtaaagatggtttggatcaacatttctgagtccaccacggctcagacatccaaatag

SEQ ID NO: 435 - DNA, 1734 bp, Botryotonia cinerea
atgcggtcgtgcaagtcatttctaggccttgtggcgtttgctttgggagcttcagcacagtatagcaaccagaccgcgccgactaatgggagcctagcatcgacctgtctttgctttcctggcgatgcatgctggccatctactacacagtgggatgcgtttaacgcaacacttaagggaaaactcattgcaaccgtcccgctagccagcccttgtcacatcgacggctttgagacatatgatgttgataagtgtaatgctgttcgaaacaactggtggtacccagagactcattacaccacatcatcttctgtcatgacacctttctatgccaatagaagctgcgaccctttttacccagaagatttccaatgtgtatacggcacctatgttcgatacgccgtcaacgcaagctcagcgttggattatcaactagctctttcttttgctagtcttcacaatatccgcctggttattcgcaatactgcgcatgactaccacggaaaatcaactggagctggaggcttggcaatctggacgcacaacatcaaaactattgtaatttcggattatgacaatgagtcagtggactattgtggaaaagcaatcaagatcggtgctggcgttcaagcttctgagcttcttgaagctgctcacgaagcgggttatctggccgccgttggttacgctggatccattggaatcactggtgggtatgcacaaggaggtggaaccggtccgcttgcctctgtgatagggctgggatctgatcaagttctggaatgggaggttgtcactgcagcgggaaaaatcgttactgccacagaaacgaatgaatattcggatttatactgggctttgtccggaggtggaggtggaacctatggtgttgttctttccgcgacatataagctgtatgaggatatggagacaattgggggtaaccttacattctacaacacaggcacttctcaggacaacttttacggtgtcatcggaagctttttggaagctcttgatgcatatactgcggcagggggtggagttaactggctcaacactggctcatactttagtatggctcccgcaatagccgcaggaatgaatcaaacacagttcgactcattttttgccccgacgctctcgaaattgaaggagaacaatatgtcatatgtatatgcctccgagacgtatgatacttttgcggatgcttataacggccaagcgggacctgagaatatcaccaattacaatatcggaggccgactagtttcacgtgatgtggtaaaaagcaacgttaccggagtcctagatactatcaaatggatgaacgaccttggggttgtggtagcaggtttagcacttaatgtggaggctacggatgagacgcccgagaactccgtgaaccctgtgtggcgtgatacgcttttgtctatcaccactggactggcctgggatgacactgattggaacgcgaacttagctagtcaagacctaatcaccaaaactatagtcccgagattagaggcactgacccctggaggaggagtatatctcaatgaaggcgacccaaaccaaccagacttccagcaaaacttttatggccgcagttacggccgtctgttatcgatcaagaacaaatatgaccccaatcatgtgttttacggacctacagccgttggaagcgagtattggacagaagaagctgacggaagactttgcaaaagcaattag

SEQ ID NO: 436 - DNA, 501 bp, Botryotonia cinerea
atgatggtggatatcgaaggttacgaagaatgctggactaaaagcatctttcactgtctgttttgccacggctatgaatggtcccctgcacagtcagcttgcatacttgcaataggcgactgtgcatttccccatgtagctcttcacctagctcgtcaagcacttcgactggctgaaaacgtcacaatctatgtgcacggaaacagggccttagctaaagaaatagaagctgcaaaagtcgcgtcaaatctagatgtcaactctgagtgtcgcattcataagccagtgactgagcagaccaacaatcttgctcgtaaactcggaatcgaattaaccgagcaaggagatataaaggtcacgtcccattttaatgagacaactgtaagaggggcttttgcgactggagattgcgcgtcaatgttgaagaatgatgtaggtactatgtatggcgggacttgcgctggtgctggtgtcgggtcccagatccaaggagaagattag

SEQ ID NO: 437 - DNA, 1068 bp, Botryotonia cinerea
atggtaggagaattggagtgtgataatcttgttgctctcgtttccatatacatacaaaattacgccctctttggcaccggtaacatctttctgcagatcattcctcgcattcaaaagatcttcttcaaaccgtcaaatgatagtcgacgcgctctccagaacgcatcatcccactacgatacctcgaacgcaattttctcttcttttctatccccagatatgagttactcatgtgcgatatgggataccactggtaaagaagaaactctcgaggaagcacagagacgaaaagtgcacaacatcattgacaaagcggatatcaagccagaacatcatatcctcgacattggaggtggatgggcatatctagctattgaagctgtgaagaaaactggatgtaaagtcacagtgataactctgtctattgagcaaaagattctgggcgagaaaagggtagagaaggcgggattaaaagatcgaattgagatattgctttgcgattacaggcagactccaaagccaagccctgcagggtttgatagaataatcagtgtcgaaatggtggaacatgttggggaggagtacatggaaacctattttaggaagatcagcgaattgttgaaccaagaaaacggcatcatggtagtccaagggataaccagaaagaataaggacttccacaaaactcgatccaaggtcgacacttttattgatcgttacgtcttcccaggaggatatctccccaccgtaagagaaattattgaacgtcttgaagtaggatctactggttctctagagcttgaaagtgtgcagagtataggtcctcattatgtgcgaactctgcgattatggagggaaaattttatcaagaactgggatgagacgaagttgttgtacatgaaagaaagaggagatatgacgccgttggatctcgaagctttccgaaaaaggtggatcagttactttagttattgcgaagcaggcttccgagctggtgttctgggtaaccatgtaattactgcaaagaggccacaagcttcgtctccaagtggaattgtcccaatttga

SEQ ID NO: 438 - DNA, 684 bp, Botryotonia cinerea
atggcgtctgtaaacaaacctggacttccaaccttccaccacctcaataactcccaatcccaacgaatcctctggtttcttgaagaattaggaatcgaatataacctcgtatgccatacacgcgttgaaggtcgtgcaccgcccgagctcaagaatgttcatttcatgggaaaggctccggttcttgtcacatccgacaatgtgcccatcgcagagagcagtgcaatcctcggatacctgatcgacacgtacgataaagatggtagatttgtggctcagaataagattcgcgatgagagtttgtcgtccttcgctgggtcgactattggtactatctccatgatcgaattgatatttgatattgtcgcacagaaatctccgtggccagtatcaatattactcggtggcgttaaatcgaacgtgcataagagtttcaccgggccggaatatgcaactcaatttcaatatctggagaaggaactgacagatgtctggttcaatggcaagaatttgggaaggtctgatgtgatgctgagttggcctatggatttcttggctgcaaagaaatatgtggacttcgagaagtaccccaagattctccagtggaggaaggggatacaagagagagatgcttggaagagagcgatggaaaagggtaatgggtatgaattagcggagatataa

SEQ ID NO: 439 - DNA, 1065 bp, Botryotonia cinerea
atggctaccgttaagcaaaaaccgatagttctgcatattggcgacccagtcaaatggaaccttgatttatatgatcaattttccgaggactttactatcatacgaccttcaacagaagagcgtcaacgtgatgccttcatgaaaggcttgaaagtaaacagatggggcaacttttccgcaatattcagaccgttctggaatactggtggtgaaatggggagatgggactcggagctcattcccttgatacctgaatcatgtcgaatatttgcatctgccggagctggttttgattgggccgatgtagatcttttggccgaccgaggtattgtctattgcaacagcgccacggctactacagaatctgtagcagattttgccattttcttgatcttagctacatttagaaacctcacttggtgcactcaagctgctcgttccggtgcagcttcgttccaagattgtcacaccaatgccgcatctatgtcccacaatcctcgcggccatacgctcggtattgttggcttgggaaatattggctataacatcgctcgaaaagcttccctagcattcggaatgaaaattatgtactacgacatcgtccgaaagactccatctcaggaagctgccatcaaagcacaattctttactgatgtagatgatatgttagccctgagcgattgcgtggttcttgctacgcctgcctctccggacggaagaaaattccttgatagacagaggttgagcaagttcaaggaaaaaagtagattcgtgaacattgcgagaggtatcttagtggatgagcaagcattggccgaagctgtcgagtcagggaaattggtgggtgtaggactggacgttcatgagcatgagcctagagtaaacgacaggctaaaggcctctaggaatgttacacttaccagccataatgctggtgggacacttgaaacccacattgggtttgaggaattggcaatgaaaaacatcgacgcagtactaaaagggaaggagccattgacgcctgttaacacgcatttgattgggaaggtgaagcataatttgtga

SEQ ID NO: 440 - DNA, 1005 bp, Formitiporia mediterranea
atgttttcagaatcccatctcaagatgtctcgtaccttcacccagttctgtttcccttctgtctcgccatcctcattggtaattgaagtcgacttcttgtcgtctttcgctttgccagtgctacgtttcattgtcaaactcccttcatacgccttgtaccatctatggacgctatttttattcacgaagtcagacattaagacaactgtaatacctataacttctctggccgtcgcgtccgctccacttggcgatatctcacatcttccacatgttatattctggatttggtttcatgtcctacagttcgacgtctcaaaccagacgctgaaaccagaagaagacgagtacaacaagcgagaccgtcctctgcccgcaaagcgcatcacttggcgcaatgcattgattttgcgttgggttctcgtcccggcgtgttggatactctcatccttttacagtgttgaaactgtgtatgcgagtatcgcactgtgcattctgacatatgtatacgacgaaatgggttatgctgctggtcactggttcggtcgcaatttcgtgaatgccttaggcttcatgtcattcgaagttggagcttgtctcattgctggttcgaatcgacatgcgcttgatcatataagttggctatctgtactatgcagtgcagggatctttgcaacgacgatccaggcccaggacttcaaggacactgaaggtgatcgacttgtgggccggaaaaccttacccattgttgcgccgacagttgctcgtcctactcttctgctcgcgcttttggcgtggtctatcggattaagcacgctttggcagctcagcactactgtagcccttgctttcaatgtcctagccatagcagttggagcacgtttcgtttcacttaagtccatcaaggcagatcagcgcagtttttatctctacaacgtttggttatccgtcgcacacgcattaccagcgtatttccgttttatcgctcaggcaccagtgttctga

SEQ ID NO: 441 - DNA, 1608 bp, Formitiporia mediterranea
atggatcccgtactgcgatggatgacatctgaacagacgtttacccctgttatcggcctcgttggtctcttctgtagcctcggtcttggattatacgctagtaaacgagcctataccccaagcaaacaaagtctaggacatggtctcccgttgcctccaggaccaaaatcactccccatccttggcaatgctcttgatatgcccaacaagcgtgaatgggagacattcacaaaatgggcagacgaatacggtgatattgtccatatcaaggtgtttggacgtgatattatctacattagctctgccaaagttgcgagcgacctgtttgagaaaagatctgctatttattccgacaggccacgtttgcctttacttgcagagctgatggactttgagtggaacttcgggttcatgcattatggagacgaatggcgaaagaatagacgaatgtttgtgagcaagttcggtccgacgaaggttcatactttcaatccagtccaagaacgtgcttctggtcttctgctgggacgacttttggagacccccgaggacttcattgaccacctccgtcttcatgctggtcaattgataatgatgtccgtttacggtatatttgtcgactcaaggcagcacccgtatataacgaccgctcaagcagtgatggactccgtttccgatgcggcacgttctggtgcatatctcgttgatgcgttcccaatactgaaaagattaccaacatggctacctggcacacattaccaacgcattgcacgtagatgggcttccgatgtacgaaagctcaggtatattcctttccttgcgagcaagactaaattggaagatggtgcaccgccctatccaacctttgttgctgatatgctagaggagtacggttacgatgaaaataacgctgagaatatgatccgggactgtgcagctctcgcgtatggagcggggtcggacacgtctgtctccactttatcggcatttatcctcgcaatggttctttacccggacgttcaaaggagaggtcaagacgagttgaaggctgtcattggttcgtctagactccccacgttcgctgaccgaaaggatctaccatatatcatggcaattgcgaaggagacgattcgctggcacacagttgctccacaggctcttccacatgttctcagagaagatgatgtctacaatggttattatcttccagcggggtctattgttattggaaatacatggaaaattgcgcatgaccctacagtctatccagatccaatgaacttcaagccagaacgctacttcaattcagagggtgaactcgactacgcctccatagatccagcaaagtttgcatttggttacggcagaagaatctgtgcaggataccattacgctgagaacacgctgtggattacaatcgctttcattttgcaggttttcagtattacaaatgcaaaagacaaggccggtaatcctatccctgttactctaaacgcttcctcgggtgtcatatcccatcccgagccattcccgtgttcgattatgccacgctctacagaagcggagaccataattcgccgagccgctgccaatgccaattttgcataa

SEQ ID NO: 442 - DNA, 1581 bp, Formitiporia mediterranea
atggcaccaatcataggtgccgcaggaattgcttgcaccctatgtttgggtcttttcgtgtatcttagcaagcgagctcaagcacccagcaaacagagcagaggacatggtcttccgcttccgcctgggcctaagccactgccgtttcttgggaatgcacttgatatgcctgtgaaacgtgaatgggaggcatttgccaaatgggcgaatgaatatggtgatattgttcatgtcagcgtcttcggccagaactttattttcctcaattctgccaaagttgtgaacgacctgttcgacaagaggggttctatctattctgataaacctcgcttaccattactcacagaattactagactttgaatggaacttcggttttatgccctatggagaggagtggagaaagtatagacgcatgtttgtgggcaagttcggagctagcgctgctcatatcttcaatccaatccatgagcgtgtctcgggcctattgctacagcggtttttggatactccagaggacttcatagatcatcttcgcctccatgcgggtcagattatcatgatgtcgacatacggtatttttgtagattcaagacagcatccatatattcaaattgcccaagccgtgatggactcagtttctgatgctgcacgagctggggcatacctggtagacgcgtttccgatcctgaagaaagtaccaacgtggttccctggagcgcattatcagcgtgttgctcagggctgggctgcggaagttcgaaggcttaggttcattccttttcttgcgagcaagaaccaattggccgacggcaaagcgccaccttttccgtcctttgtcgctgatgagctagaggaaaacggctatgacgagaaagacgctgaactgatgattcaagattgtgcggctgtcgcatacggagcgggatccgacacttccgtcgcaacgctcactgcattcgttctcgcaatggttattcacccggaaattcaaaagaaagctcaggaagagcttgcagcagtcgttggaacttcgaggctccctacgttcgctgatcgcaatgatctcccatatatttcagccatcatgaaggagacaatacgatggcatacagtagctccgcaggcactcccgcataccctcagagaagatgacgtatataatggttatcatatcccagcaggatccattgttatcggcaatacttggaatattacgcatgacccggcactctacccagaccctatggagttcaagccggaacgttttattaattcagaaggcaaactcgatttttccggcgccacggacccgtcaaagttcgcttttggttatggcagaaggatttgcgccggatggcacttcgctgagaatacgatattcattacaatagcactcgttttgcactgtttcaacatcacgaatgcaaaggataaggctgggatgcccattcctgtctctcttaatgctggttctggtgtcatttcgcatcctgagccgttcccatgttccatcactccacgctctgcccaggcggaagccttaattcgtcaagctgccgcctccgcccaatttgtctag

SEQ ID NO: 443 - DNA, 1599 bp, Formitiporia mediterranea
atggcagcgtacactggtccattacgctctcgcgcgatgtccttccctacgaagccagtccttaaagatctttttcgtcgacgtgcttccgtgtctcttgattttctcgtcgttggaggcagtatcgcaggtctcgcctgtgcgtacaatctaaaacaagctgggcataatattgagacgttttgccttgcatgtgcgctatgtcctcgtgtattgattcaacaggtatctggaggcatccgagttccgccaaatatgacgaaacttcttatgcattggggattgggtgacagattgatcaagactggtgtgcggtgtccctacatagagttcctcgaaagcgataccggatcgttccttagttctctggtgtttcacgaagaagtgatgagagagcttcaagctgacatgtatggattgacagtgagtacaaaaatagctggcgatcatctcgacacggcactcatccgacgccccgatcaacagtattcggatctttattcaatgatatatgacatcacggttgcatcgggagttaatgtagagtacaacggcgaggtggtagatgtggacgtggacaagccaagtgttacattggcatcagggcggaagttacgtgcggacattattgtcggtgcagatggagcaacaagtatagtgcgcgagaaattggttggacgtaaagaaaaccatagaccagggccgttaaacggctatacatatactgtccctgtcagtaagatgatggaagaccccgaacttaggccactagcggagaacaagggagtgtggatagtttggatgggaaataatacctgcgtcttgacatttttggttgtaagtttatcaactttatcggagatgaagattgacatacacacatctctaaagcgaccagacgagtatgcgattcaactgattcatcccactaagaatgccaggcatgactggtataagctaacgaatatggcggcaattgtgggtaaatttgatgactatgagccaagagtgagacgtcttttgcggcttgcaacgcaaggtgtcgaaacacggcatatcatacaagaaccgctggaagattggtacagtgaaaatggccatgtggtagtccttggggatgcagcccatgtattgaaccctggaacgagccatggttcttcactggctgtggaagatgccgcagttctcggttctctcttctctcggttgcgtacacgtagctcacgcgaaattctgcgattgctggctgcgtaccaagaaattcgagaggaccgctgtatcgaagtcacgagaaccgagtacgaaacttgtgcattttcagttctgcccaggggggatcctagacgcgaagagcgagatcttggatttgctgcctcacgggatatgaaggttctcgattgggaaaatctcgacgacccgttcctacaacgcatttgggagcaattcaagggttctttcggctacgaggcgtacgatgccgcggatgattggtgggtagattggggtattatgcaagaacggatggctgcatcatcaatggctgttatcgagagctacgagtcctcgcagaacggcgaaggcacggatctatacaactaa

SEQ ID NO: 444 - DNA, 1176 bp, Formitiporia mediterranea
atgccttttcctacttctcctgtttatgaaaacctcttccaccggcgtgcagctgttacgctggatgtagtcatcgtgggtgggagtattgcaggcctgtctgcagcgtacaacctcaagcaagctggtcacaactatggcgatctgtatgagttgatccgtgacatcgcattgcgctccggtgtgaaaatcgactacaacacgactgtgattgatgtggataaagattgcacatttgtgcttcttgaggacgggtcaagaatcaatgcagacttgattgtcggtgcagatgggacctatagcctcctacgtgaaaagattaaggacccgcttcttcaaccgctaacagaagatggatcgtggacattatggatgggggatttacaatgtacccttggttatcttgctgcgccggatcattacctcgtgcaacatatcgatacgaaaaacacaggcacacatggatggaagcaaactgttccattatccgaacttgacttttctgcgtttgaagagagagtgcaacgacttctgtctctcagtactcatgcggccgagaaccagcatatcgtacaaacccccattgaaagttggtattctaataatggcagactagtccttgtcggaaactccgttcatctctcaagtgcagggtctatgaatgaagttgctttgtcggtggaggatggcgcggtcttgggcagcctgttctcgcgacttcagtcgagagatcaggaagaaattctccgtcttctcgccgcgtatcagaaaatccgtcaggatcgttgcaatgccatactacaaactgacaacgagctcttgacattctccacgctgcccccaggatctgctcgtgacgaacgtaacgcaggctttgccagggcatccgagcagaacatgcttgactgggagaatgtggacgaagacgttctgcgtagtgcgtgggaagagtttcggaattcattcgggtacgaggcttacgatgcggcggatgactggtgggttgactggggcatcgtggtacatcgcctatcagccgctcagaatgccagtaccatagacgatgatggcgatgcttctaatggagagtgctcgtcaccgttgcaagccggactccgcacgtctatcttagatggactgcataaacagactgttattactactgtggaaaattag

SEQ ID NO: 445 - DNA, 4236 bp, Formitiporia mediterranea
atgggtgacgctcgtctgcagcgtgttctgtcaagactgcggaatcttcctgcaatcgctttgccgaccgactacccaaggccctctggaacgagtaaagtcgtcgaagctgtccagacggttgagctctcggaacaggtatcgctatctctattgaaactcgcattgtatgaggaggatagcgagaaggacgacgatgatgatctggccttgaaaaatcgaccatcgcttttccagcttttactagcagcatttaccgtactgctgcatagatacaccggcgatactgatatcgttattgcctcgtcctcggcatctgcgagtgaccccttgctactcaggttatcagtagaccctacagatcctttctgggcgattgtaaggcgtgtgcagcaggtggaaaaagaggctgaggatgactccgtcccattctcaacgatagcagaggcgcttaagactgaagacaacaggcctttgtttcgagtccgattcttcgacgagacagattcgcctcacgatgagtttgtacgttcgacgagtttaatctctgatttgaccatctccgtcattcgcccagcaatttcttcgtctcacgcatcgctggctccgcgcatctctctaagaatattatacaactcgctactttttactccttctcggatagagtgcatcatagatcagctttctgtgctcttgcgcaagttgggttcatcacccattgccgccgtagggagtattccgcttcttactcctccacaacggtcgcgtcttcccgacccgacagcagacttgcactggtgcgactttaaaggcgcaataaccgacgtgttctctcgaaatgcacgcatgcatcctgaacgcccgtgtgtcgttcagtacacgccgactcgcgacaagatcgtgtacacctacgcgacgatccgccgtgcagctaacatccttgctcaccatctccttcagggtggcgtaaaacgagaggaagtggtcatggtatacgcgcatcgcagtgttgaccttgttgtagcagttatggccgttcttaaagccggtgcgacattctccgtgattgaccctgcgtatccaccttctcgacaaacaatctacctggaggtggccaaaccaagagcattggttgtactcaagggtgcagggatcattaatccatctgtccgtaaattcatctcggaggaagcaaatattcgtgtcgaagttcctgctttggagctccttccagatggttctatagccggaggcgaagcgccgggttccacggaggatgtcttgaaagcacacatacaccttgctgacacagacccaaatgtcgttattggccccgatagtattggaacattatcttttacaacaggcagcaccggcattccaaagggtgttcgcggaagacactacagccttacgcattttttcccttggatgggcgaacgttttgaattggatgagaaatctcgctttacaatgctaagtgggattgcccacgatcctattcaacgagacatgtttacgcctttattcctcggtgcatcccttcacgtacctacggctgaggatattggaacaccaggacgcctcgcagagtggatggcggacagtcaagtgactgtaacgcatctcacacctgctatggcattttttgttggtgatgtactcacgaagcgcgactgtcaccgcctgcagggtctcgcaccgcacgtgcgtatcatcaatatgtacggtacaacggagacgcaacgagctgtgtcgtatttcctcatcccaagcgtctcagaagacccaaccttcctcgcaacacagaaagacattatgcccgctggagaaggcatggtcgacgttcaattactcgttgttaatcgcaatgaccgtagcatcccgtgcgcgataggtgaagttggtgagatctacgtccgttcaggtggtctggcggagggttattccgatccggaggcgacggcacaaaagtttgttacgaactggttcgcttctggaacttggccggacacgattttacatccacccaaaggccttgcaggaccggaatcacgctactggaagggtgtacgcgaccgtatgtatcgatctggtgacttgggccggtatctacctgacggcattgtcgaatgcactggtagagcagatgatcaagtcaaaattcgcggtttccgcattgaattgggcgaaattgatactcatttaagtcagcatcctctcatacgcgaaaacgtcacgcttgtcaggcgcgacaagaatgaggagaagacgctcgttagctacttcgtaccgctggaaggtactgcacttgatgaatacgccagcgatgtgccagatgcggagggagaccgtgctttgttctctggtataaggcgttatcgtcgactcataaaagacattagggaacacctgaagaggaagctcccgagttatagcgtgcctacagtctttgtacccttgaagcgcatgcctctgaacccgaacggcaaaattgataaaccggcgcttcccttcccggatactgctgaagctgccacgtctgacatacgccccaatgttgaacaagccggcgcgttgactgcgacagaaaggcatatccagactatctggggcaccattctcactacaatgcagcagccaattgcactggatgaaagcttctttgacctcggtggacactccatactcgcaacgaggctcatctttgagcttagaaaggctttcgtcgtcgacgctcctctaagtcttgtttttgaccatccgacaatcagagagcaagcttccgagctcgatgctttgcgcaactccgatttaggtttggcttaccaggacaagggaagcacgacagctcttacgaggcaggatgggaacctgctgaatgttcctggtattcccaagaaacgcgcgcaggtagttgaatacgcgaaggacctcgagaccctgattccacgcctcagggggaagtatgacgcgctatccccatcgtcgtcaatgttgacggttttcttaactggcgcaaccggctttctcggagcattcattctgcgcgacttactgtcacatcagtgtgtgcagaaggtaatctgtcatgttcgcgcaacatcacgagagaaaggattggagcggctcaaagagggcgcgggtgatcgcggtgtatgggatgagagatggttagagacaaagcgtttggaagtcgttaacggcgaccttgcaagtgagaggtttggtttggacgatgcaacatgggaacgcatttcgaacgaagtggacgtcgtcgtgcataacggcgctttggttcactgggtctacccatatgagaagcttcgctccgcaaatgtgctctccaccttaacagctatcgacctcgcttccacaggacaaaagtcgaaggcccttgtgtttgtgtcatccacggcagtgcttgaatgctcgcattacgtccaactttctgaccaatcgtcgcgtactggtggtggcgggggtgtgccagagagcgacaacctcgatgggtcacaaacaggtttgaagagcgggtatggacagacaaagtgggtgtctgagaagctcttgaatgaagcaggaaggaggggtctcagagggtctattgtgcgtcccggatatgttgtcggagattcacagtctgctgttaccaatacggacgattttatttggagactggttaaaggctgcatccagcttgggctcgtgccagatataaacaacgccatcaacatggtcccagtagaccatgttgcgtacatcatatccgcagctgctgtgtccccttctacggtcgaaaagcacggcattccggttttacatgtcactgcccgccctccgccaacgtacaatacgcttttctcatctcttcgccggtatggctatgccgtctctcaatgcgaatacctggtctggaggcgacgacttgagcaacacgtccttgcatcacaggacaacgctttattcccgcttctgcatttcgtacttgacgacctaccaacgagcacgaaggcaccggagctaagcgatgaaaatacacgtgcattattgaagagtagaggagcaaaagagaatgttacagtggatggtggattaatgggcatgtaccttgcctggttggtagagtcgggattcttgcccgtgccatccgcggacgattcagatgagaagctgccgagcatacgcctgcaggaaggcacacgtgtgcgtgcagttgggaggagtggtgcataa

SEQ ID NO: 446 - DNA, 2025 bp, Formitiporia mediterranea
atggcaaattttgtgcgccgaattgtgtcaggaaacaaggctcgcttcaaagataaacaattggatatggaactcgacctaatctatctaactgaccacatcattgtaatgggattcccagccaccggcgtggagggcttgtatagaaaccgcagagaagataccaagaagttcctcgaccatcgacatggaaagaactattgggtattcaacttctgtccactccgggagaactcctatcctgctagcttctttgaaggccgagtaagtcgttatcctttccctgaccaccacgcgcctcctttggccattttcccccttttcgttcgtgaagctcgggaatggctctccgcatcgaaggataatgttgccgttttgcattgcaaggctggaaaggggaggtcaggcacactcgcatgcgcgtatcttctctccctcgatgaaacaccctcgcctccaaagctccagcgtagcatgaccaagaaagaatgggcaaagaatcgggctgaacgagtaatggagacggttgaaatcgatgagatggacgaagtgctcgtacaggaggatacgagcgtcccctcgggaagggatgcgtccaaacccatgtctgaatatgtcggtgaaatcacactgccttcaaccttagaaccagaggccgaaaatccagagccgaggaataaaggcaatggcggtgatggtaacgctgcagccacgatcatcggaaaaccgaaaaccgagacacccacaagtctaagtcctcgtggtggatctatcgcagacaatattgaccacgatggtatgcaagatgtgaaagacaggtcgaaggctagaccctttacacttgaggatgtacttgctctccacacagcaaggcgtatgaagtcaccttcctcgccggataagaaagtcaaacatggcgtttccatcccaagtcagagacgttggttgaattactggtcgttacttcttgcaaacgaggcaccgtcagccttctggcagtcacctcttccacgagtgcgcttacgtgaaatacacgtacaaattcgcgacttgggcggactgaaaatgaaccttctcaaaattgcgaaccacataattgagaagacaggttctgcaaagtacggcgttcacgaacatggtcaaggccctatatgggtttcactcgcgcggtacaatgacgaacttgttgaacttttagagaggtgggagcatcatacgagggccgaggatgggaatatgggtaaaagacggcttggaacggagtacatggccggaactgcattgcgcgagatttttacagacggcaaatgggacaagagtaaaatgatcagaagttttgcacgcctcggtgcttctgacagtaagcggccagagggcgggaatgtggtgagctataagttacaaccgcttgcagaccagacgtgggaagccctccaagaggaaatgcaagagtctgacagaggtccagatcttgaccccgaaatgcgtcaatccctctcagcggcagagtcaagagcgaaagaaataacaatgtcagccaaaagctccgtcaccgactttgcgcatataatagacgatacaaatacggaaaagggagtgatattggatgccgctcgggaggttcgcgctaaactctacatgggccaagtcttcatggggtggttttggttcatcccagccttccacatgcctccacctcctgtagactcgaagcaacgatccttgccgcctaccgtgacaaacttcgtactttcgcgtaaagagattgatttccctatcggtgcgggtgccgcactggtcgacatcgatgtcgctctagaatgggttataccggacctggatccggtagccgctagtcgtggtccgccgaagacacagactagcggagattctgccaaaggtacaggcggggaacccggcggtcctggtggtatcgctggtagtgttgttgctggtgtacgagctgttgtctcagattctaccggaagggaagtggttgaggcactcgaggcgggtgaacagtaa

SEQ ID NO: 447 - DNA, 189 bp, Formitiporia mediterranea
atgtcatgtttatgggccgtaaaagggtctcctagtggtgaagtagatcggaaaccggccctggacttgcctcgcatcatgactgagggctgggactcgattgatattgggacactgaggagcatgcgtgcacggcatgacttccctattgcccttgcatttgcggcatcttcgccaaaccttcgttaa

SEQ ID NO: 448 - DNA, 837 bp, Heterobasidion annosum
atgctctctcagccaaccactttcatagttgaggccttgtatacggcctttctcttcacaaaatccgatataaagacgacagtcataccaataacatccttcgcggctgcagctgcaccgctgtgtgggttggctcgtctccctcaatccgttttttggatctggctgcacctccttcagtttgatgtatcgaaccaaacgcttagcccggaggaggacgaggtcaacaaacaggatcgccctctaccgtccaagcgcatcacgcttcgaaatgctattttccttagatgggtcttgattcctgcatgctgggctttgtcagcgttctacagccgcgaggttctttgggcgagcatgtcactagtgctgtttacagtcatatacaatgagtgttcagcccacgccggacactggctcgtccgaaacgtagtgaatgccgctgggtttgcttcgtttgaggcgggagccactctcattgctggtcctaattctcatacactcgacacgactgctatcattgctatctgttgtagtgcgggtatatttgccacaactatccatagccaagatttcaaggatagggacggcgacaaggccataggtcgccatacgattcccattgtcgccccagccatcgcgcggtacacagtcgttataccacttttattgtggtctgcattcctctcgaatttgtggcaactcgatgtcgtagccagctgtggattcttgatcgtggcgttattcgttggtgtccggtttttaatattcactaccattgccgctgatcaagtatcattctattggtacaacgtaagttatgagagtcgtgttttatga

SEQ ID NO: 449 - DNA, 1527 bp, Heterobasidion annosum
atgaatcatacgaccctcgctgcgctgacctccgctgccgtatctctgtcttactggcttttctttcgtcgccgtcaagtaccaggccctgcttcgcctcttccactccctccgggtcccagccctttgcctttccttggaaatgtcttggacatgccacggaaacgagaatgggagactttctctcgctggcacaaagcctatggggatattgtcttcgttagtcttgtgggccggcctatgatcatcttgaactcttttgaagctaccacagaactccttgatgatcgatctactacgtactctgatcgtccacgttttcctctgatcgacttgatcgatcacgaattcaattttggatttatggcttttggacagcaatggaagacgaatcggcgtctcttttccaaccagtataataagaatacagttcacacattcgagcacgcctttcgtgcttctgtttcgactctactcagaaacctgctacgcgaccctgagagcttcgcggatcacctgagactacacgcaggacaagtgatccttgatgtaacctacggcgtgacggttacctctcgcgaagatcctttgatccgaattgccgaagccgtcatggacgctacctcggtcgcaatcagtcctgccatgtgggttctcaatccaatccctatattgcaatctcttccaacatggctcggaggagagaatttgtctcgtcggctccggcaatggcagaaagacatacgcgatctccaggatgtaccgttcgagagggtcaaggcttctttggttacaagagacgtcaggccatctttcacgtcaatcttgttgcaggaagacgacagtgcagaacaagagaatatgatacgccaatgtgctgctgtggcatatggagctgcttccgatacaactgtcgcggccgcagtagtattttttcttacaatggccctttatccggacgtgcaaaagaaagcacaagccgaaatcgatcgcgtcgttgggtcagatcgtctaccgaactacaccgaccagggcgagcttccttatgttaccgcggtgttaaaagaagtactacgatggcatccgccttctcctacaggccttccacatatgactacgaaggacgacgagtacatagggtaccggattccggctggaagcatcgtcgtgggaaatatctgggggatgttacacgacccaaggatgtatcccgacccgtccgtgtttgaccctgaacgataccttcacgctggtcgacttgactgcagcaccaatgatccttcacgaattgcgttcggattcggcaggcggtcgtgtccagggaagaactttgctgaaacatcgctttggctcttggttgctcaatgcttggccgtgtactcgatttctccggctgatgagaaagcggctcataacctggactttacgtccggtgctatttcgcaccctatcccgtttccttgtatcataaggccgaggtcagaaagcgcgagaatgttgctggagaacatcagtgccgacttatga

SEQ ID NO: 450 - DNA, 1536 bp, Heterobasidion annosum
atgtctttcgtggtagccaacgtggcttctgctagtctatgtctcatctgcgtatacatcttgacttggcgatttcggcgactacgtctgtctctacctccaggtccgagacctttgccatttattggaaatctgcttgatttaccgcgcaagcatgaatggaagacgttcactcgctgggggggaatttatggcgatgttgtctatctcacgatatttggaacgtctatgcttgtcgtcagctccgttgaaccagcagtagatctcatggacaaacgatcggccatatactcagatcggcctcgtttcccgctcgttgatctaatcggacaagattggaatctcgggttcatgaactatggaaaaccatggcagaagcaaaagcaggccatgatgtccaagttcagcaagactgcgataactgcttaccggccggcgcaacatcgagctcttcgtatcctcctaaaaaacctgttggataatccagataattttacggaacacttacgactctattctggtcagctcataattgatgtaacatatgggatcccaatttcgtctcgagaccacgaactgatcaagacagctgaggcagttatgcacagcatcagtgtcgcactgtccccagtcttttcggtgttcaatcttactcatcttttgcaagttctaccccactggttaggcggtggacggttttcgaaccttgtacagaagtggcagtctgatgctcgagcgcttcatgagattcccttcgatatggtcaaggcgtctatggattctggaactgcaagaccctcgtatgcatcgtcgcttcttgagaatttgaagccacaggatagctcggatgaggagagtgtggttcgtgatacttcggcggtcgcttacggagcgggggctgacacttctcttgccgcggtgtccgttttcttcctggtgatgcttcagaatcccagggtgcagaagatggcgcaagatgagctcgaccgcatcatagggtcgtcccgacttcccgatcacggggaccagcctgagcttccgtacatcactgcagttatgaaagagactctgcgatggcacgctgcaacaccactaggtatagcacatatgctgacaacggatgacgagtacagaggatggcatctgcctgctggttctctgattgtcccaaatgtatggggaatgctgcgggatccgaagacatacgacagccctgccgagtttcgaccagaacgtttcctccggaatggcaagctcgattgtccagttgacaaagatcctgcgaggattctcttcggatttggcaggcgcgtctgtgtgggcaggcacttcgtgcaagatgcgatgttcctcctcatcgcccaggttctctctgttttcacgatctcgacaatcgacggcggttctccctcgaaggtggatatgacttcgggtggtgtttcgatgccgatgctttacaagtgtttgattcgaccacgttctgagatcgcgaagagggtactcgaggatgatatcctgagcgcagacgatgtctga

SEQ ID NO: 451 - DNA, 1311 bp, Heterobasidion annosum
atgctcgttattgcaagtcctgcgaaaccttttactttcacggctaagcgaacaatgcggcgaaacgtgatccttgacgactacgcggacgagattgcggcggcgtatcgctctatgaagaacgctgacaattcttccattcacgtaaaccctccaagctcttgggatttccctcggaccctcccgttcatccggtccgtcatagcctcaatattgaatggagggacatctgttggagacgatgatgacttatttcagcatggccttgatagtctccaggcaatggtgatcaccaatgagattctacgagcgttcagaaatacagctaccaacacgacgcgccttcaagataactttgtccatgcgcatcctactatatccgctcttgcacggtttgtgacgtcctgctctgggttaggacctgtggatacttcttccgacctgatggagaagaaagcagaagagttacaggagactgtagccaagctcactgcttcattctcggcacatagtcctcgtattggagcacagaagccaacaggcgaaacggtcttggtgactgggactacaggtagccttggcactcaactgcttgctcagctaatcaggatacctactgttacccgcgtatatgcgctcaatcgaggagaaccggaggagacgaggcgtagacaggaaaacgcatttgagcgacaggcgatctctagcagtgtggcccgttcgaccaaggtcgtttatctccgaggcgatataacatcgtccgctcttggtctaggtctagaaatgcgagatgaagtcctggattcgctgacaacgatcgttcataatgcatggatggtcaactttaacatgccatttgccgcgtacttgcccctcatagagggtgtgcgcgaggtggttgagctcgcattggcttcgcccttggctgaaccaccacgcattgtattcgttagctctgtgtccgctgttcgagtcgggaatggctacggagagtcaaagtgggccgcggagcgtatcatgtctgacgtgcggaggacgacagttctgaagacggtgattgctcgcgtagggcaactctgcggaacaaccacaaatggatgttggaatgcaaacgagtggtttcctttgattgtgcgctccgctgatgcattgcatagtcttccggagagagatgagttagtctcgtggcttccagtggacacggccgcatctgctatcctcgacctgcggcatgtaccggacgacatggacactcgatgtgccccttttgccatattccgagtggctgcaatcgttgcagaatacatctag

SEQ ID NO: 452 - DNA, 1311 bp, Heterobasidion annosum
atgactaccttggatgaagccccgtccgctgccttcgaagaacaaatagtcaaggccaatgctgaaccgaacaaagcccgcgatgttgagaagactgggtgggaggaaagtgcacaggaaattgactcggctcaggtcccggtcgacattcccgatggagggtggtgggcgtggtcgaccttggctggagcttcgctggagggtgagccatatgtgaacgcatatggagtctaccaagacttcttcgttcgaagttttctcagtaattactcgtcgtcctccatcagctggattggcagtattgccaccttctttttgctcgctggtggtgcagtgtccggccgattatttgatagaggatatttctattttctacttgtcggcggctctgtcttgatcgtcctatgcttgttcatgctctcgcttgccgaaccgcagcactattatcagatcttcctcactctcgggctcggcttaggacttggcactggtgcaacatacgtcccatccctcactatcatcgcgcaccatttctcgcgaagacgtgcgctcgccatgggaatcgctgcttcgggagcctcacttggcgccttgctccatccgatcatgctcaataacctctttcatgggccagtcggctttgcaaacggcgtgcgcgcgagcgcgggattgatggcaggggcattgatcctagcggggcttctcatgcgcacgcggctgcctccacgaaagggagctcagatgggtctatttatgtccgcgcgaaccttcgtgaaagacgaggtgtatacaatcgctgttgtggcaacattccttttcgtccaaggcgtcttcttccctctcttctacattcaactctactccgatgagcacggaatcaactctgtgtttgggttctattcgctcacgattctcaacttcgcgtcgttcgtgggacgcatcgtgggaggcgccttggttaaccgcttaggagccttcaacgttatcgtcgcctgcacgtttgcgagcagtgtgcttctgttctccttgcttggagtgtccacaatcgcgggcatcacggtgttttctttgttgtacggcttcaccagcggcgcatatatcacactggtggctcctatggtggcctcattgtctgcagatgtctcggagatgggtgcacgcatcggggtcatgtacttcttcacaggtctcggaagtctcataggcactcctatcaccggcgcgctactcaccagggattttgtctggtggcggccgatcgtatatacaggggcaagtgctgattggcgttctcgatggattgcgtgctga

SEQ ID NO: 453 - DNA, 1524 bp, Heterobasidion annosum
atgtcctctactgctgttcagaaaggcggcgtcttatgggaggcgaagaacgatacagcatccgactctcattatacctacaagaattctggctcccccgcgcgcacctgggattgtgcggtgcttgccaaggtagatttggtggtcattcctatcgtgggcatgttctattttttgtccttcctggataaagcaaacatcggcaatgctcgtatcgccgggcttcagagagacttgaagatgacgaatcatcaattctctacggctctgactgttacatacgttccatacatactcatggaaattccaatgaatcttctcatgaaacgaatcggcgccaacataactctccccaccatggtcatcttgtggggaatcgtctgcgcatgccaaggtgcagtgaagacatacggaggacttatcgcatgtcgtttcttcttgggagcgatggaaggcggaatatttccagggatcgtactctatctctcgtctttctacaagcggcatgtattgcaaactcgattttcgctcatgttcagtgtaacatcgcttgcgggtgccttctctggactccttgccgccgctattcagaatatggacggaataaagggactcgcgggttgggcatggatcttcattttggagggtgcgtgtacgactgcgttcggcctgattagcatgttcttcatacctgcgactccggctgacatgccatggctcacgagtgacgaaaaaacaatatatctacgtgagttggctgaggattggagtggggacgatgagaccgacatcttcagctggagtgaggtctggagcgttttcgtggacggaccgcatatattgttgttgtgccttcccatgtttctgaatggtgtcatgctctttggtcttgccaactttattccaacgattgttaatgccctcggcttctctccgacgcacagtcaacttttggcagcccctccttacgcgtgctctttcgtactcagcgtcatgtgctcctatttcgctgatagatacaggcaacgaggacctatgtgtatttgtgtgaacctcatcgcggctgcaggttatgcaatcttccttggcacctcgaacaagcacgcaaactatgcggctctgttcctccagatagtgggcgtatattcgactgcgccctgcattggaacatggagctctaacaacgtccaaccgcactaccgtcgtgcgactgccatcggattgaacttcatttgcacgaacattggaggtacacgctttcctctttgcgccatcaccttcccacagctatccactactgacgtgcaaacccctaggtatagtctctacatggatcttcactcaccccccgcggtttcacgatgcgtccgtcatcagcttaaccgcctcgctcggcacggtgtttttctccggaatcctgatggcctacctcaagtggcgcaacggagtgaagctcgaacaggtagagcggttgacgagagagaatggggaaggtctggaacctggaggatggaattcacatag

SEQ ID NO: 454 - DNA, 876 bp, Gelatoporia subvermispora
atggccgtttcggcggtagcacaccatattatacactggtcgtataccctcttcctcttcactaaatccgacatcaagacaaccgtgataccgataaccttacttgctgcggctgctgccccagcgccgtcgacaatgactctcttacattccaccttttggatttggctgcacgttcttcaattcgacgtctcaaatcagactctaaaacccgaagaagatgaatacaacaaacaagataggccactcccgtcaaagcgtttaacactcgaagcagcatatgtgatgcgatggatgctggtgccactctgttggctgtggtcggcgatgtatagcgtcaggacattttactcgagtgttgcgctggtcgcattcactgtcctttacaatgaatgtgctactcatgccggacattggcttttacgcaactgtgtgaatgcggcaggttttgccgcatttgaggctggttccacactcgtagcaaccattgatcatcgaactttggacaggactgcagttctctccatctgtatcagtgctggcatttttgccacgacaattcagacacaagacttcaaagatgtgcacggagaccgcattgtaggaaggcgcacccttccgatagtctggccatccgtagcgcgttacacagtcctcgttggactctgtctgtggtcactgattcttgcgtccatctgggacctgagtatcgatgcgcagatagtttctcatggtttatccatatttgtgtcataccgcttcatgacatacaaaggcatccacgaggaccagatatccttctactggtacaatgtctggctctcaatcgcacatgctcagccggcatactatcgttacttgagctctcatttctga

SEQ ID NO: 455 - DNA, 1533 bp, Gelatoporia subvermispora
atggttgatttgttgtttttccaacccattcaactagtcccgtggtgcttcttttgtattgcctacctcgtctggcgtcgatatggattcacccgagcgacaggaggtcgtccattgccccctggacccccgggtagacccatagttggcaaaatattcgatttcacacaacacgatgtgcaccgtttgttcatgcgctacagcgagcagtatggtgcattgcacgatctacatggcctgggaaaacggatcatagttcttaatgaactctctgcaatcaatgacctccttgagaaccgggctgctatatattcgcatcggccagaatcagtttccggaggcgttctcatgggcttcagcaagagcatgatccttttgccgtacggaccagaatggagagcgcacaggaagctcgctcggatggcccttggtccaacacagctgaaggaatatgccattctccaagaggatattgcagcatccttagcggaggctttactcgacacgcctcatgacttcttctctctcgttcgaatcggcgccggtaggatggtcatcgctgtcacatacggcattcgcaactctgcatttcaaacagagtgtatcatgaacggggagcgtttcgttgaatttgccaggaggacgtttactcctggaaattacctatgtgacattctgccattcctcaaacatgcaccttcctgggttccctttcaatgcgagctacaacacggaaaggaagcattcattgaattccaaaccaaaccgtttgagtatgtcaagcaagagatggacaagggaaatatcttgccatcgttgacccttcgtcttctgcaatgtcccccccaagggatgcccgatttcgagagacatctaatgtgggtcggaggagctatgttcggaggtatgcctgtctgcacctatgcaaccgttctcacgtttattatggcgatggcccttaaccgcgataaacaacggattgctcaagctgaaatcgacgccgtgatcggtggagatcggcttccaagaatcgaagaccgacgacagcttccgtatgtggatgcggtcataaaagagaccatgagatggcaacctgctcttccgttggcaggtctctctcggtgcacagcgcatgatgacttctatcggggtttcttcattccaaacaattctatcattgtcccgaatgtctgggcaatagcctacgatccaagatcaaagtataatccggaagcgttcataccggaacggttcatggatgtgaacgagaaaatcgttgatccggatcaatgggcgtttggatttgggcgaagagcatgccccgggcagaatttgggagaaaattccgtgttcattctagtagcgacaattttgtcggtcttcgatattttacctcccgagaatgaggctttggaacaagagtttacacagcacgtgtttcgttcccctaagccattcaagtgctctatttcgcctcgcactttcgccaaggcacgacttgtgcgacttcgagctgcagaaggcgtagcatag

SEQ ID NO: 456 - DNA, 1611 bp, Gelatoporia subvermispora
atgggtgctgtacttccacccgtttggacgggcacactcccgggtaacgtggatgtattgtgggaccgctggaaaacgttttcctgtggatatccatccgatagccacgccaagatgtcagagaaattaggacctacttttgcgattgattcgatgtggaggcatcacatcagcacgtcagatgcaaatgtcataaaggtgaacactgctagtcagattgtgacagacttctccaaattctccaagggcgatttgttccgcgacattatgcgtggattcctggggaatggtattttcaactctgacggagagatgtggcgatttcatcggcacatagcccgcccttttttttcaagagtgaaggctgcaaagcttgaccttttccaggcctatagcggtaacatcatttatcatcacatgaaagtacatgggtcgagttcagatgcagattctgccattgcaaaaatgaaagggcgcttcagagaagggcacaccgtgaactttcaagaccttgcctcgcgctatgcgctggactcgtctactcagtttttgttcggcaggagcattggttttttacgtgacccgctcccttatgaatggaacgccaagcgcgcagactcttctccgccgaatactccagcagagcgctttgctcactcgctacggtcactacaagaagtcgttgcagagcgttggcggttgcaaaggatctggcccctcttcgagatactcgaagacaagtgcaagacacatatgaaagtgctcaatttgtttgttaatccaatagtgcgcgaagcgctagagaggcactctaagttagaacatgactcaaacgagcggggcgcccgttcaccagagccagagacatttgtcgattttatggcgcatcacacaactgactcggtgcttattcacgacgaaacactaaacatgctgcttgcggcgcgagactcgacctcggctacaattacatttactgtgtacttcctttgcatgtatcctcatgtgctcaaccggctccgtgcggaagtacgagctacggttggtttgacacgttgccctacggaagacgacatacgaaacatgaggtatctgagagcagtgatcgacgagacgatgaggctataccctccagtatcttccaatgttaggaacgcgacatgtgacacaacgatacccaattctgacccgcgcggaaagccattctttgtacctgccgggacgtcaatagtctattcgcccttgattgtgggacgcagacaagaatactggggacacgatgcggaagagtttgatcccgacagattccttgacgggcggagggacaagtatctgcgcagaaatccatggatattcgttcctttcaatgcaggaccgaggacatgccttggacaacagtttgcgtacaacgcaatgtctgtcttcctgatacgtctgctccagaacttctcagagatgcatcttgcaccggaagcacaacctccggggaccctccctccggacgactggtcgacggcaaacggacgaaaagggaaggaacggtttttcccaaagaaaagcattacattatattcatcgggagggctttgggtgcgcatggatgaagggtag

SEQ ID NO: 457 - DNA, 1809 bp, Gelatoporia subvermispora
atggttgacaatatcacggacgtcgccagcaaagagtttgactacatcatcgttgggggagggacgtgtggtcttgtcttagccaatcgactatcggaggacagctctgtccgtgtcttggtccttgaggctgggaatgctaatttaaacgatgccatgatcctgactcctgctatgcgcgcaagactcttcaatgacccgaagtacgactgggccttccgcacagtcccgcaagagcactctaacaatcgagtgtatgcttgggctcggggcaaatgcctaggaggaagctcggcgatcaacttccaattgtggaacaagccggccagagattatcttgacgcgctgaccgagctcggaaatcctgggtggaattgggagacattcgacaaatactcaaggaaggcagagaggttcgccgtacctactcacgattcagacgttctgacgtacgacttggcccatcgcggcaacgacggtccgctcgtaacgtctttctcgagcgtcatttccggcctggagaggcccgcgttggaggcgttcaagcagcacggcgtgccggctctcgccgattcttcatcgggcttgacgaacggcttcacagcaatctccgcgacacttgatcccgaaacccatacgcgaagctactctgcgaacatgtattataagccagttgcctcacgggagaatctgattgtgctcgtgaatgctcaagtttcacggcttcaggtcaaaacgaacgacgatggtaccattacggctaccggcgttcagttcatgcacgatggaaacctatcggaggcaagggcaaagaaggaagtcgtgctatgcgcaggggccatcatgtcgccgcagatcctcgagctctcgggaatcggtgaccaggaggtactacgcaaggccggggtagatgttcagctcaatcttcccggagtcgggaccaatgtccaggaacacctctacaccggtgtgacctatcaggtcactggttccgaatacggcggacacgagctccagacaacggactcactgatgtatcccgaggaagctgcaaagcagctcgctcttcacccgtctggccaaggcgcatacaacatgctgcacactggaattgtcttccttccgctcgatacagtttgtactagtgctgccgacatacagaaagtgctcgcagataccatccgagccggcttcgagaaagacgcgtatccaaatggtcttcggaagcagtacgaattacagctgaggcatctcagggacaaggtgccgagcctcgagatcgtcatcactccgggacccattacccgccccacggttcttgacccaacgaggaagcaaatgtccctcgtcttcgcactcaatacccctttctcgcggggaaccattcatatcaattcgaatgatttccgggaacaaccagtgattgacccacgaatcttcgaagagccctatgacttgaacactttagtggagctcgtcaagttcaaccgacgcgtcgcccgcaccgagccactcgcaggacttctgtccggaaccgaagtttacccaggccctcagatagaaacggatgagcagattgctgagtggttgaagaacacaattagcacgacgtaccataccgtcggatcctgttcaatgttacccctcgaagatggtggcgtcgtcgacccgaagctgaaggtatacggcacgacaaacgtccgcgttgtcgatatctcgatcattccgctgcacgtgggaagccacacacaggcggtggcatatggcatagctgagcaagctgccgatatcatcaaggctgatatgtga

SEQ ID NO: 458 - DNA, 2091 bp, Gelatoporia subvermispora
atgccggtccgtcactcggcagcagccgcatcgaccgacttgggcgtccgcgttccgcgcgtggtcccatgcaggccattgctcgacttctcgcccaaaaatccagtctccatctgccgccatcgtttcgcactgacccgatcaacaaaacattcccatatccgccgtgcgtggtcttgtttgtgctcaccccctcgtctctcaatcaccaacatgggtgcagtagcgtctagccagctgaaagattctccgagcgtatacgcaactaagatccccgagacgggccaagattcgactgcgacgaagtcgtcgatcgacgtcaacggctggaatcagtatgattatgtcatagtcggcggtgggactgcggggtgcgtcatagcatcccgcctttccgaggaccccaacgtacgcgtcttgatactcgaggcagggaggggtcacaattcgggcttgttggacctcacccaccttcccattggatttctgcagctgtataggaccgaggtagactggaattttgagaccattcctcaggcccacgcggacaatcgacaagtgtacttcccgcgaggcaagctcttgggcgggtgcagtggcaccaatgctgccatattccatcactgcgcgccggaagactttgacgaatgggaacgcaagggagcagcaggatggaattatgcgaccatgatacggtacctactcaaagtggaaaaatatcttcctaactcagcctatcgcgatgtcgatgcgagccatagaggatcagagggacgcatttttactaagaagtctgaggagattccaccagtgaacaagaccgtcctggaggcatgtcagaatctcggtattccctacacagaagacctcaacacgcgcaaaggaacactgggcgctacggagttcatgggcacggtcgatgcaaagggcagccgaagcagtacggccaccgcctatcttaccccagacgttctcgctcgcccaaatctgacggtcggggtgcatgtcagagcggagagaatcatttttacggacatcgacggcacgtcccgcgcttcaggcgtcatccttgcgtccagcgcaacgggcgctcgctatggcgtgctcgccagccgcgaggtggtgatgtgtgcgggcagcgtggcgactccgcaactgcttatgctctccggtcttggaccttcggcacatctccaggatctcggagttaccgttgtaaaggacctcccgcatgtcgggcagaatctcgctgatcacattgcgaccggatcgctggtctttcgcgctaagccaggcaccaacatcagcctagactatctcgcaaaaccactgaacggtgcaatagcgcttctcaagtggttactcactggacgagggcccatgtcctgcatcgccgccgccgccgccgcgttcattcgttctgatgatccagctctgaaagaagcgttctcgtcaaacgcatctgctaacgtcccagtgcgcgatcgcacgtctggccctggtgcgccggacatcgagattacatggggcgccatagtctcgctcgacaatggattcaagaagcctcctcctggttgtgaggggctcacattcagcgcgattgccctacgtcccgaaagcaccgggtcgatcaggctcgcctctaggagtgtctgggatgcgcctgtcattgatgcaaactatcttgcgtcggaaaacgacgtcaatgtgctcgctcgcggggcgcgtctcatcatgaggcttacgcgcatggagccacttgcggagctcctcgaatttaagcttgtcgccgatgagtccggcgaggacgtgttctggcctggcaatacagatcccgacgaggtatcggatgaggctctgcaggcctggatacgcaaacatgcatgtccggtcttccatcctgtttcgaccgcccggataggcacaaacgcagagaacagcgtggtggacgcgatgctgaatgtgcacggcgtgctaggcttgcgtgtagtggatgcgtctgtattccccacacaactgtccggccatccgtgcgccgtcgtggctgcaatggccgaacgggcggtggaactgatgcaggaggaacgctga

SEQ ID NO: 459 - DNA, 2844 bp, Gelatoporia subvermispora
atgcccacttttgcgctcttaccagacttcttcacttcccagtgcattgagcagcccaatggtatcttgtactacgttgttcacgctcatgatagtggtcttggcctcgatatctaccccaaaagcagaatcgaagttcttcgggacgctcaagcagctgctgggtatctgcaaaaggctggagtgaagccaagggtaccaggaggaccggctcagactatctcgatcgtcatgcgacatggctacgcatgtctcacgatgttcctcgccacatcgctgaatcgctgtgcaccggtactcatctcgcctcagaataccacagagatgatcacagctctagcacaaacttcaaactcaacagcgatcatcgtggacaatgaccacattgaacttgcctcgcagattcagcaagaaattccttcgattctcgtagtacactttgaagctttcaatgcttcccgcagtgttccgcccacaaacgttaatttcttgccagcgcttacggaaaggggttatctggctgagaaggataccgcctgttattacatgcacacatcgggatcaacgggtcatccgaagctcatcccggaagtccacagcagctggtgggataaggtccatcgttatgcagtacaagagcaaggtcacccggcggtagtaatgacgcaccttcagcacacgcaaggtattctacggtttatggcattaccttggttatctcgcgatattcctgttcttgtggaatccaagcgcccgttcgatggggatctcctttgccgcctcctccagcagtttcccggagccaccctttggaaggcgagagaacttgtcatgatgcagctgaacacgacattattgacacagcacgacagtacggaaactgggcagctcaccatcctcgacatcgcctctgatgacccgcttgattggccgtacatgagattcctcgacgaacatcagatctacatggtccctgtttcgggatctgacggtgtatgtcagcttattgtcaaggctggacgctttgtgcctgcagatctagtcaatttctccgatcctccaggctatttcagcggtgatttgttcaaagctcatccagcgaagaaaggtttgtggaaacatgtgggacgacgaggctcagtgactgtcctaagtaatggcaagaaaacggacaacggtcaaatacgttctctcataactcgaagcccagcgatacgagatatcgtcgtcttcggagaaggccatgtccaaaatggagtgattatttggccagcttctaccttttcaaaccatgaaacgaccattgacaccctgtggcctgtggtcaaaagtgcaaacgatgcgttgcctccccattcacgaattgtgaaagaactcgttatcgttgccagtgcctccaagccatttgcgctctcggataaaggtagcgtgcgggaattccaaacgctgcgcctttacgagcaggagatagagaatacgtatgcgagtcttgagagtggatccgtcaatatacctctaccacttcatgatgatggtggtggaatcttgacatacatcagggatactgtacaacggcttatggggaagaatattgacgataccacgaattttttcgactcgggccgcggctcctcaaatgacggccacccagagcaaattgacctagaacgccttatatcgaatctgaacgattcgtggagttctctggggaccattgacgcacgttctcctcaaacagactccaatgagccatgggtcattcttctgactggttccaggggagccctggggcgtcagctcctgccacttttcgtagcatcacagcgagttcatgccgtgtattgtttggatcgtcgcttggacccttctcgtgctacgacatattcaagcatgcctaccggtaattcctctttaccatcagggaaggtcaggcgctgggagatggatatctcactgccgcacctaggtctgcagggtgagccattgcagctggtgcgggaacatgtgactcacatcgtgcattgcgcatgggaggtgaactttaatcacccactggaacgattcgtgaatacacacatcaagggtgtccaaaccctcatcaatatcgctatatcgacacagcgtgccactttcccccggctggtcttcgtatcctccatcgccgccgtacgcaattatgctggcttgggaaagattgcggagcgctgctacttcgactcgaggattccttccgacctaggttacggacaatccaagtacgtcgcagaaagaatcctcgctcacgcgtcggagaagacaggactacccatcaccattgttcgagctgggcagttgtccggatgcatgacaacgggcgaatggaacgaacacgaagttttccctatatttttccgctcgtgccatctacttcgacgtatccctgatcatgcagcggatgcttgttgggtaccaattaacttagcggcacaagccatctttgatatccttcagcatgacgctagcgccagtgcgccgttgctgacagtacgacacatcgatagcgcatacgcttgtgaaggatctcgcttggtccattggcttgttcgggcgtccggtggtacgctggagacagtatcggtcgaatcgtggatacaggccgtgcaagaggctgaggaagatatacccgccaaacgacttcttcaagttttcgacgcctggaagtccgacgcgaatcaaagcgcctccaaagctctatctgtggagagtaccagagagatatctcaaatggctggcgggatcccacttacgtacgagctggtgtctttgtattggcgtcatgccacccggcagctgtctgtgacctag

SEQ ID NO: 460 - DNA, 681 bp, Gelatoporia subvermispora
atgtcgctcctgaacgctgcccgcaccgtcgcgcgcactcgtgctgcgccccgcctcaacgccgccgcgctgtccgtcgccgcgcgtggtgttcacacactccccgcacttgattacccgcatgatgccctcgagccgcacatctcggggcaaattatgaagctgcaccatgagggacaccacaaggcatatgtcactggcttgaataccgcggaggaggcgtacgcaaaggcgagcacgcctaaggcaaagatcaacctcctccccgcgctcaagttcaatggcggcggacatatcaaccacacgctcttctggaagaaccttgcgcccgtatctcagggcggtggtgatctctctcagggcccactgaaggatgcgctcgaggcggacttcggttctgttgacgcattcaagaagaagatgaacactgtcactgcggcaattcagggctccggctggggatggcttggctacaacccgtccaccaagaagctcgaggtggtcacgacggctaaccaggacccgctgctctcgcacgtccctatcattggtattgacatctgggagcatgcgttctacctccagtaccacaatgtgaaggccaagtaccttgacgcgatctggaacgtcatcaacttcaaggaggccgagcgtcgctacattgaggccgccaagcagtaa

SEQ ID NO: 461 - DNA, 1599 bp, Gelatoporia subvermispora
atgtcaaccatgcaggaatccgacaaacaggaagtagctgaggacaccacctataccacgcagcggttatcggaggaggagctcaaggcatttcttgtcgagtttgggcctcaagatcgagacaatcctaagaattggtcccggagcaagcggtggtatatgacgatcgtggctagcttaatcgcattcaatgcaggagtagcgtcatctgcaccggctgggatcgcctccaacctggctcttcaattcgcaatgtccgaagaattggtagttctgtgcatctcattgtttgtgactgggtactgcgttggcccagtactatgggggcctttgtctgagcagtatggccgacgactcgtattcttgtcaacgttgcctgtttatacttgttttcaagtcggatgtgctctcgctcacaatcggacgtcaatcatcgttttacgcctcttggctggtatattcgcggcagctcccttcacaaacagcggtgcaattatctcggacatgtgcgttattcggacatcgttatcaaacatcatatgcatgcctcatctgtgcagttgggacgcgagtactagaggaaaggcaaacatcctctttgcgaacgcgccattcattggatctgcgctcggacctctcgtcggcggctacatttccgtttccgggatttcttggcgatggaccttctgggtcttgacgatcttcgtaagtttgatgcgcgaaatgtttcgcatgaatgaacacatcgtacagaatggcctctgcatcacccttgttgttacctctctgccggagacatacccgcctatcctgcttctacgcaaagcgcggcaaaagcgtgttcaaaccggtgatcaccgctactacgccccaatggagacgtatcacctcgtagcgttctcggatcgcctcaaacagactctgttgagaccgttcaagatgctgtttcaggagcctatgctggctgcaaccaccgtgtacacaagttttatctacggaactatgtatatggttttcgaagcctttcctagtgtttatcaaggggagcatggtttcaatccaggtactctaggtttgacgtatctcccggtagtatctggctgcgtgactgctagctttgtttaccttctcgtgttcaatccacgctacgaagctgcagtccaacggtataagccgaaccatgtgccgccagaagttcgtctcgagatggccatgtggacatccccactttatgctattgcattcttttggtttgggtggacgtcgttccctcacatcactgtttggggaccactgtccggtgctttcttccttggattctcctccatactcctgtttctgtcacttatcaattacatagttgatgtctacctctttgctgcggcatctgccctcgctgcgaatactgtcgttcggagcgctgcagcaggtggtctcccgttgttcgctccgaggatgtacagcgcactcgatcctcgttgggcatccaccattctgggatgtgtcgccttactgatgatgccaataccttttgtgctctacaaatatggtacgaccctgagggctaagtccaagtttgcgcctacgatacaccgttga

SEQ ID NO: 462 - DNA, 2499 bp, Gelatoporia subvermispora
atgtttatggtggaagatgaagatgtccagaaggattttacccccattccaccatctcctgacatggagaagactggattcgtgtgcgatacatcaggcaccaccgatgctttagattccttggatgctcctgttatatcgatccacggtgtacaacccctgccggctgacccgaacgccgctcttgctgagctccctcaagagctcaatccacgaagatggagcgtgtctcgcaaatgggtcaacgttagcatcatcgcattccaagcaacgctctccccgatatccagcactttactggccgtaggacaggtgcaaatagacgaggagctaaccgtacgaaacactcagctctccgcaatgccagtcgccatttacattcttggcttgggactgggaccactgtacttggcaccgctgagcgagatgtacggacgcaggatcgtttacgttacaaatgccatcatctctttcctcagcactatcggttgtgccctagttcaaaatgacacaggcctcataatcttgcgacttgtagcgggactggcgggcggtgcagggccagccttgggaggcggctccatcggagatttatttgaacgtgaagatcgcggcggggcacaggcaatatatagttttggaccgacgttcgggcccaccattggaggcgtaatcggaggatacattgcagagcgtgtaggatggcgttggacaatgtgggtttgcgccattgcgagcggaatttcggctattgcgtccgtcttgtttctttgcgagagctatgcaccatatctcctggcccgtcaaagaggacaaaagtccgcgccgacgaccactgggggacttgctcatgcgctcactcggccaattcgcatgctactttttgcgcccatcgcaaccgccatgagtctatacgtcgccgtagtgtacggtctattgtaccttcagctcgtgacaaggcctctgctgtttgggcccgagccgcaatacgggctcttcacgtacaagtggcacggtggcaatactggtttgtcctacctcgctgctgctgtcgggtgcatttttgccttgatcgtatctgtaatgggaatgaaccggtcataccgtgcgctatgcaagatatacgacacagagaagcctgaatttcgacttccatttatgcaggccgggatcctgattgctccttgcggactttttatatacggctggacagcagaggcacagacacatttcatctttccgctcatcggggccgctatcttctcgttcggcgcgctcgttgtactgacatgtgtccaaacctatctcgtcgatgcgtttgggaaatttgctgcatcggcgcttgccgcatcggttttgtttcgtagctttggagccgcattgttcaccgtattcgggacaagaatatatgcaagtctgggatacggctggggatccagtctactggcattcatatgtctcggcgcattacctgtcccggctattttgtggatatatggccctcagatacctagcgataccgtgtcatccgggtggcaggtcctcaatccatctgtcttctcgacgtctgtggtcggcgcaagccttggattgtcgcagttctacgcggatgcgctggcaatctacggaacgtcaggatatccatttgaagtcatgttggatggtgtcacatcgaccgatccgactgcatctggtcttctcttttctcaaaatacaggaaggggtgcacacaacctcaacatcactgctagcgcagtcgatgcctccggtgctcaatttgcattcgaatatgcagtccttacgagcgactacaatgcagatcaagctccggaagaagtagaactcgatgtcgaagatacccatctagtgtattcgtccaactggttcataattctcaacggcacagctcacacagagaccgtcaacgcttccgtgtccttaactttcaacggaacggcgatcgcagtggctgggccaaccggtactgagctcaacccaggtgattatacgatcattttggatggacttccatggaccttttcgaataataccttcggagtggaggaaacggatcttttcttccagagtggcctcacgagtgatgaagagcacacaatcactctggtcaacagcggtggccgggttgccttcaactcgatgaccgtgtggcagatcagtatgctaagtgccgatggctcaagcagtaactctggctcagggccgtctcgtgccagtaccaccaaggtcatcgccccagttgtctccatcatcggcgccgtcatccttctcggtctaattctgtgggcacgacgacagagaatcctgcgccgacgttcggccattctcgcaagcccctttggaatgcgtctcgtgcgatctctgggccctgatgtatctggttctctaagattgaccgagctgcgagcgagcgagcgatcggatccgacggatgtagctgtagtgcacggaggaggcaccatgaagcctcgcgaggtgtaa

SEQ ID NO: 463 - DNA, 792 bp, Dichomitus squalens
atgaaaactatcttcttccctataacgcttttcgcatggtgcacagttccgaacaccaactcattggcctttacgcgctccgccctctggacatggcttcatctcctccagttctgtgtctccaaccagagtctatccccagacgaggacgcgcagaacaagccatggagaccgattcccgccggtcgcctccctgtacgtcaggcgactaggcttcgatgggccctcctgccactctgcctgttcctgtcgttttccttcggcatcccggcggttggtgccgtgttgatggttggcattctcctccataatgagctgaaactcgactcccattggttcacgcgaaacgttctgaacgccattggctatgcaacattcgacgccggtgcgatgacagtcgctcaagctggcgcgcacctctcattctcgtatccggccctggctgcgcactacacgagtatcgcgatcgtcctaacgacgatccatgctcaagactttcaggacgaggaaggcgacagagtccagaagcggcgaacgattccgatcgtgatgcccgccgccggacgcctctcaatgccggtcgggcttacgctgtggtccctggggttgagcgaaggatggcacctcccgaatgcgcaccgtttggctcttatcacaataggcctgtatgtcgggtcgcggttctacttcctccggtcccctggcgcggacaagacgtcgtacaggctctataacgtttggttggcgattgcgcgtatctcgcctatgtatggacggattcccgtgatgtag

SEQ ID NO: 464 - DNA, 1578 bp, Dichomitus squalens
atgtctttgctcagttccctcgacacctggatgcttgcgctggtcgtgctgtcattctccggcgcgctcctttgcatagcatatccagatcgcctcgtcaccacaaatgctcgccctgacctcccaggtcctacaggacaccctctatttggcaatctactccaagccattccttggcaaggccgcatcctcgattggttcgaccacctcctgtcgagctatggccctttctgcaccttcacactactgccgtgggggagaggcatactcatcaatcgtcccgagtggctcgcccacatcaaacaagccgatatgaaggcgtactcgcgtggaccatacgcgatcgagatcttcaccgagtttccaggagggaggactcctgttgcctcagaaggggctcaatggcgacttgcaaggaagtcgatttaccccatcttcactgtcaaatctttcactgagcacgtctcgcatgccatgaacgagattgtgccaatggctcgagcactgctacttagcgcgagcaagagggacgtgccgatagattggagtgacttcgccggtcgtatcgccattaccatctttacactttcgcacatgaaccaccatgccaacgtactccagggcgacgtcacttgcttagaccgcgatgatccactccgcgatgcactggctgtgctcaacagggtttccgcgaaacgactattcaaccctgcgtggcgcttcactgagctcctcaatggcgatcgtttccgtttctcccgtgctcggtcgtacatccgcggacttgtcgaccaaatcgtgcgcgcacgacaagcccatgccaccgagaagtccaaggagaccgcgccgggtcatgccgacttcctctctgtgctcctggaagaccctgctttcaacgatcctattctcatccgtgacatcatggtgaccatgctcttcgccggccgggacaacactcagaacgtcctcgcatgggcgctctattccatcatggcggcgcccgagtggatcgaccgcttacgtgaagaagcgaccgcgaataggcacccgacgcatgaagtagactactctgaagtatcacgctaccacgtccacctcgctgtattttttgaaactgtgcgcttgtggccaggcttgcccaagaacgcacggttggctctacaggatgacgttcttccggctttgccagagtatgatctgcctgcggtgaagatcgagaagggtgattatgtgttttggtctgactatcacatgatgcgtagctcgggtgtatggggaccgacggccaacatgttcgaccccggacgtcatctagactccgaaggtcatttcaccaagcccgcagcacccaagttcaactgtttcggcgcaggaccaagattctgcccaggacagcagctcgtcatgtacgagttcgtcgcagctctggccggaatcctcccgtatttcgactttgctccctccgagcgtcccacgacgtctggattgacttacgagaagccggagctagcagaggcgttcacagcatctttgactgtgccactgatagtcgacacgaagatcaagttggaatactag

SEQ ID NO: 465 - DNA, 1632 bp, Dichomitus squalens
atggcttacaccgtgggtggtgtgcccatttccttggttgctggctttgtcggccttgtgtggttggtccgcaagaagctcattgccatctatgtcacccccatcgtggctttgagaggaccacctagcccaagcatattgtatggcaatttccagcagttgggcaaagtcgcggaccccactcttctccagaagtggatggacgactatgggccgacattcctcgcacgattgttcatattgatgccgtgcttatggacggctgaccctcgagcgatcaatcatatcatcacgcaatccggaaagtacttcaaacccagagatggccgcaagcaagccgcgcaaattcttggagagagcctcattattgccgaaggggaatctcacaaacggatgcgcagggtgatgaaccctgcgtttggcccagcacaagtccgcgagttgacatctatatttgtggagaaggccactgagctgcgcgagtactggaagtctgccatggttaaagaaggcggcacgcttagagtgaacgttatcgaggacctcagcaagacgacgcttgatgtgatcggattggcaggattcgatcacaacctggactcgttgaagcccgggagcgaacgcaaggagctcaatgccgctattcggcatctcttcaaaaagccaccaaacatgacggtctttcgcgttctgctagattatgcgccttggctgaacctctttccggatgagcgcctgcgaaatctcatcgaggcgcagaaagttatgcgtcgcgttgcacggcagctcatcgaagacaagaaggcagcgatcaaggcgtcatcagaggacgacgagcatgtcgggcgagggagcgttcatgggcgcgatctcctcacgcttctgatcaaggcaaatatggcatcggacattcctgtagatcaacgtttgtcggatgatgaagttttgtctcagattccgaccttccttctcgctggccatgaaaccacaagcgtagcgactacatgggctctgtatgccctaagcgagtcccctcgtatccagagaaagttgcgcgaggaactccttgcagttcctacggagactcctacgatggaggatctgcatgctcttccgtatctcgaccagttcgtgcacgagactctccgcttgtatcctccggtgacgaacacaatgcgcgcggccaacgaagatgacgtgatccccctcggggagccgatcatcgacaagaaggggaacgtactacatgagataccagtggcaaagggtactcgtatcgtgatccccattcttgcagttcacaggtcgaaggcaatctggggcgaagatgcccttgaattcaagccggagcgctgggagaatttgccggaaacagtttccagcgttccgggtgtctggggccatctccttacgttcctcggtggtccacacggatgcatcgggtacaggttctcggtcaccgagctgaaggctctcctcttcgccctcgtgcgcgagttcgaattcgagttggccgtgccgcacggagacattgtgccgatgggactgctggtgcagcggccggtcgttcggaacgagctcaacaaggggtcgcagatgcccatgataatacggccataccagccgtcgtga

SEQ ID NO: 466 - DNA, 1392 bp, Dichomitus squalens
atgtctgtgctcaatacactcgacacctggactctcgctttggtggtgctgaccttttctggcaccctcctttacatcgcgtatccagaccgtctcgtcacgaccaacgctcgcccggacctcccaggaccgaagggccatcccttggtgggaaactctctccaagccatcccgtggcagactcgtattctagactggttcaaccatctcctgtctgactatgggcccgcttgcacctttaccatcctaccatgggggagaggcatactgattaaccgccccgaatggcttgctcacataaagcaagctgatatgaagatgtactctcgcggcccatacgccaataagatcttccacgagttccccggaggaagagcccccgtggcatccgaaggcgcacagtggcggctcgcacgaaaatcgatctacccaatcttcacagtcagatcctttactgatcatgtctcgcatgctatgaacgagatagtacctattgctcgcgcgctgctacttagcgctagcaagaagggcgtgcccatagactggagcgacttcgcgggtcgtattgcgatcaccatctttactcgttcccacataaacgaaaagacgaatattctggaaggggacgtttcgtgcttggaccgtgatgacccactccgagatgcgttagtaacgctcaaccagatttcggccaaacgtcttttcaatcccgtctggcagtggtcagaaatactgtcgggagagcgttggcgcttcaaccacgctcgctcctttatccgcaggcgggtagaggatatatgggtggatcgcctgcgagaggaagcaatggcgatcagggacccaactcgggaggcagaatactctgaagtcgcacgctaccacgtccatctagcagtattctacgaaacggttcgtctatggccagggctaccgaagaacgctcggttggctcttcaggacgatatactcccagctctcccagagcataacctccctgcggtcaaagtagagaagggagactatgtcttctggtcagactatcacatgatgaggaacgaagatgtatggggaccaacggcacacttgttcgaccccgggcgccacctcgatgccgagggacatttcgtgaagccatctccggccaagttcaactgtttcggcgctggaccgagattctgccctgggcagcagcttgtcatgtacgagttcatcgcttgtctctcaggcatactcccgtacttcgatttcgcgccttccaagggcgccaccgcatctggcttgatttaccagaagccagagctcgctgagtcctttactgcctcgttgaacgttccgctcgtggtagatgttcgtgcccgcgatactctcgaggtgcttgaaggccgtttgtga

SEQ ID NO: 467 - DNA, 1128 bp, Dichomitus squalens
atgcagacccaccaccagacctcgcagtcgttgaatgcgttgctggcgccattcagcaagcagttccagaatggcctcctgcggcagggtacatcgtctgtgccattgctgacgaccatgtcgcaatactacatgctccagccttccaaacgactcaggccttgcctcatcctcctgatgtgtcaggccacgaacgggcttggctcagactgggagaccaagagcacgagcttgtgggtcggctgctcagccgaaactgacgctctcgagaacatacttcctgagcagctgtcgctcgcccaggtgtttgagattctgcacgtcgcgtctcttctgcacgacgatgtcatcgacaacgcggagacccgccgcgggtccccatccgttcccgccctctttgggaaccgtcgcgcgattctcgcaggagacttcctcctcggtcgcgccatgcgcctcgtcgggacgctcggctcgccagaggtcatgtcccttgtcgcagaggtcttctgcacactcgtcgagggcgaactgctccaggcaggctacaccgacctgtccctcggcagtgctgtcgtcgatccggtccaactcccgagagtcgcccaggatccggccgaagacgaaatcatcacgtccctctggcaagagtacctacaaaagacatacatgaagacggcaagcctcttcgcgaaagcgatggagtgcgctgtcatactcgggggcgcgacggccgaggacccgttgagagaagcagcatcttccttcggcgcatgcctgggaatggccttccagatcgtcgacgacttgctcgacttcgagggcgatccgaagaagctcggaaagcctgcgaacgcggatatgcggctcgggctggtgacggcaccggtcttcttcgccctgcaggaagacgagagcatccgtccgcgggtgcttcgttgctttgagggaccaggggatgtcgaggtgacagccgactgtgtgcggaacactcaggcgctgagccgtacccggaagctagctgaatcttacgcaatgaaggcgcgcgaggcactgaatatagtccccgacagcgctgcgaaagaggccctcttgaaggtcacgtttgctatacttgcccggcaggcttga

SEQ ID NO: 468 - DNA, 1818 bp, Dichomitus squalens
atgggtgtgctaacgtcgaaggctgccccggtcagcggcccctcatcgattgctactccctggactcccactgtgagtagcgtggtttccaaagtagagacggagcactggaagtcctttgactacatcatcgttggtggaggcccggcggggtgtgtcctggcgtctcggttgtcggaagaccggaccgttagtgtcctccttgtcgaggccgggaagagtcacgaaggcaacctgttctcgcggattcctttggcgtggaacaagctactcaagagcgacgcggattggaactatgatactgccccgcaagaaaccatacatggccgtacggtatattggccaagggggaagatacttgggggcacaagctcgatcaatgccatgatataccaccaatgtcccccagacgacttcgacgcctgggagcgacgaggtgctacgggatggggatatgcaaatctgaaacactatttcgagaaagcactccaggatggtccacggaaaagcaaagtcccactgctcgctcctgtgtgcgccgccgttctgaaggcggcagaagcgctgggcctgccaatcgtcaacgacttcgataccgaaggtactctgggtgccgggccattcgcggcggcagtgcatcgcgctgagcgaagctctgcggccgtcgcctatttgagcaaggaggtccgcagcagacctaacctaaccgtagtggtgtcgaccttcaccgagcgaatcctgttcaccgaagacctcgatggcgtgcccagggcgatcggggtacagctctctacaggtcctcttgctcgcaggttcgccgtccgcgccaagcgggaagtgatactgtgctctggtgtcgtaggatccccccagctcctgcagctctcaggcatcggagacgcgtctcagctcgagcagctgggcatccctgttgtccgcgatctgccgtccgtcggacgcggcttgcttgatcacttttccgcaggcactctggtacttcgggccaagcccgggtgcacatgggaccaccttacccaaaatcccctctacgcggcccttgcgatgatgaagtggctcttcttcggccgcggtcctatggcgtccctcagcgcccagatcggcatcttcaccaagctgcacgacccgagcttaccgtacgggcctacgcccctccctatcaaggacctcacctctggacccaacgctcccgacttggagttcatggtcttccccgtggctgtgatcaattatgggttgggcttccctcgtctcgggaactacgggatctctgtgggtgcggttctgctgaagcctgcaagcactggcaccgtctccatacgatcgtctagcgtatacgatcacccgaacatcgaccccaggtacttcgaagacgaaagcgacctgaaggcgctcgtccggggcacgcgcttcatcctccacctcgcgcgtactgcgcctctatcctcggccctcgacctacgcaatctctccactgcaccgcaagaccccgacttctactggcccggggacgccgacccagacaaggtatcggacgaagaactcgaggcgtgggtcaagacgcacgcgacgtctgctctgcatccgacatcgtccgcgcggatgggcaccgacctgacgacgagcgcagtcgacctcaggttgcgggtgcacggcgtgcgctcccttcgcgtcgtcgacgcgtcggtgtttcccgaccaagtctccggccacccctgcgtgcctgtcatcgcgatcgccgagcgcgctgcagacttggtcaagtcggactttcttgccagccagcttgcgcggtcttga

SEQ ID NO: 469 - DNA, 1845 bp, Dichomitus squalens
atgggctatggtcactcgagacttcttgcaactgatccatcgcaatacgctacgccgtggtctcctgctgatggtgctgcggtgatacctcctggagaatggaattcgttcgactatgtcatagttggtggcgggactgcgggctgtgtgctggcctctcggttgtctgaagatcccagcgtgacggtacttctcatagaggctggaacgagtcaccgaagcagtttctttagccgcatacccatgggtttcccccgcctattcaataccatctatgactggaagtaccgcactcaacctcagcgggagcttggtgacagaccagtcgactggcagcggggaaagatacttggcggttccagctccatcaatgcccagctgtaccatgagtgcgacccagcagacttcgactcgtgggagagccaaggtgccacaggatggggctatgaatcgatgagaaagtactttcggaaggcggaaaggtatatgtcgcacccttcgcaccttgtcgatccatcgggtcatggacgtgatggtccttggatcacctcacacgtgccaatagctcctatctctgccaaggtcattgaggctgctaagacgttgcgaataccggcttcaaacgatttcaacacttcggagggaacgctcggtgctggttacttcgtcgccagcattgacgagaaacatgaacggacttccgcagcaaccgcgtacttgagggaagaagtcttgaaaagaccgaatctgcttgtcgcaatatctacaactaccgagaaaatcttgttctcgtccgacgagacgggcgatcccaccgccgtcggcgtgcagatcagtagaggcgaacgagccgcgaagtacgttgtcggcgctcgcaaggaggtcatattgtcggctggggcgatcgggtcgcctcagctgctcttgctttctggtatcggacctcgtgcacatctggagaagctcaacgttcctgtcgttcgcgatctccccaaagtaggccagaacttgctggatcatttctctgcaggggcgctgctgttccgcgcgaaaccgggcttcacttgggattgggtcgtttataatatctactggtcggctgtcgctttggtccaatggctcattcttggaaccgggccactctcctccctggcaacgcaggtcggcatatttgtgcgctcggatgacccaaacctcccctacggggagtcgcttcctgtcacggatatgagctctggccctcgtgcaccggacatagagtttgcgattgctccgtttgttgtcattgaaagtggcgctcatacacctcctcgcgggactcatggcatcactgcgggctctgttctgctgaaaccgtgcagcaaagggtcaattgaactacgttccgcaagtgtgtacgatcaccctatcattgatcccaactacctctcgaatgagagcgattggaacgtcatgatcagggcgacacggctcttgcttcggcttgcaagggctccgccattgtccgacgcgctggaccttcggacgctgtccgcacccggagacccgctattctggccaggcgatgcggacccggagaagatcatggacgaagagatcaaagcagtcattcggcgctacgggcaatccgcatggcacccgagacagacgtcttctgcgcgaatgggctcttctccgcatgacagcgtggttgatatcgagctgcgggtgcattgcgtgcggggcctgagagtcgtggacgcatcgagtttccccgaccaagtctccgggcatccctgcgctgttgtggtggctatggcggagaaggcggcagaactgattgcgacgtcacgttcgcaaggatga

SEQ ID NO: 470 - DNA, 318 bp, Dichomitus squalens
atgggctgcggcggggatgctccgcgttctctgcacgatgcagcactcgcacaaaagcaagaagacgcaagcaaaggacctcgtcggttcggtctcccagatcaacaacggcatctagaccatctgcacctatggcatggcccgtcgtcctgcgcgccctccccaagcctcgtgcacttcacgtccgacgaccagctcacgcccgtcgtgaactcgcacaacatcgacgcgcaaggccagcgcaacctcgaaggcgaggtgttcgtgctcgagatgtacgccgcgtggcgcgactgggctgcgatcgggtcctcatga

SEQ ID NO: 471 - DNA, 987 bp, Dichomitus squalens
atgagtgccgttcttgagggagtgctactgcaacagacgtttcgatactttcaaatataccgctctgatccttggtacctcaaagtctgggtcataatcgtggtggggtctcaatcggctggcacggcactcactatgcatacggcttatttctacctggtcaccaattacttcaaccctggtgtcatcattgcgggtgctgcaatctccgctaaggtgttacccttcattggagccgtaacaaaccttgccgtggaactcttctacgtcaggcgggtgtacttgctcggacgtcgtcacaaattcttcgctatattctcgctactcctgattctcactggaatcgcgttcctcattgtcctgggtgcggaaacgttcaaattcaatagtctccagcaggatacatccaatggcgggcttggtggcagttcaattgcaagcccgacattcatgctggctgcagatgtccagttgacaggtgttctcatatttgccctacacacaagtcgcagtggtatttctcgtaccaacaagatgatcaacatgattatcgtatattccgtcagctctgggttcctcatctgtgtagcgaacctcgtctccatcatacttgctgctgtacagcctcacagtgtccttttcactgtcgccacgatggtcggaggacaaatatacagcaactctttcattgttgcattgaacacacgccgcctcgtccagaggcgcggtgacaagccaacgacggtcatggacccctcgaaaactgacattctgcaaggtggtcctgggtccggaactgcgatcggtgatatggagctggagtcgatggcgttcgctggaggggccatttcgactcaactgaaggactccatggcccacggagactctactgcagtgttggacttcaagataggaacgctctccacaaatggtaccatgccagtgatggacgagaaagcaggtccggtagaggaatgccctgtgtaa

SEQ ID NO: 472 - DNA, 987 bp, Pleurotus ostreatus
atggccacgtactctagccgtcttccttctcctctcaagcctttggaacacatctggcgtacggcatacgcttttacgaagtctgactacaagacagtcgtcttcccagtcatctgctatgggataatggctgctccacagatgtccatcaccagacttcctcacctcgcggtatgggtgtggcttcaccttctgcagttctgtgcagcgaatcaggcgttgagccctgaagaagacgcattgaataagccgtatagacccatcccagcgggcttaatttcgattcggggtgccagagtccttcgttggctcctcgtcccggtctgcctggcgctctcgtggacgctggacgttatctacccagggatcagtctagccatctcgttcgtcgtctacaacgagctcggcttggataactactggtatacgaagaacttcctcaacgctgtgggcctcgtctcctggaatatcggcgcggccaagatcgcatgtgcagagaatgtttccctcgaccagcgggcctggtttgcgccttacgttagcacgcttcttatcgctacgacgatacatatccaagacttccgcgatgaggcaggagataggaaacagggacgagtcacattccccgtcgtgatgcccgaattctctaggcgcatgacattcctcatcgtcgcagtgtggtcgttcggcctcgcgtcgtattggaacctaagcagcgtcgcatctccgtggttcgtcacactggggatgtacgttgccctcagagtgctccagcagcgcaccgagcacgaagataaggtctcattgcggatatacatggtacgttgtcatcccccgaacgcacccacttcatccccgcctaacccgataacctgttcagttctggctgtgcgttgctcaaatcctccccttctggacaaggcaaatggagggaatagcccagccgtggctgccaaatgctcagttcggggctattcagaacaatga

SEQ ID NO: 473 - DNA, 1536 bp, Pleurotus ostreatus
atgatgcgtacttcgtttgcaatcctcgcggcgattatcccgctaacattcacgtttggtgcttcggtagagaatcttctgcccagaaacaccacccaaaagcaagaccttacaccagctcaatgctgcgacggcctgaagcgtatcttagacccttctaaagtccttctgccaggctcccctgagtatgcggctcaggaggcctcctattactccggcgaacaggtcctacagttccctgtctgccgagtcgcacccaccagtcccgaagacgtctcaagtataatcaaatttgctaccacaagtaactgcaattttgccgtacgttcgggcggtcatatgaactgggttggttcatcgaacatcggtcccgaagggtttactatcgacttggaggacatgaagcagattgagcttctggacgattcgaagactgtcgctatctccccgggattgacctgggccgatgtctataccttcttacgtccccacaatctgcatactgccgggggccggtcgtcccacgtcggtgtaggtggcttccttcttggaggtggcatctcattcctctccctcgagcacggtttcggaagcgacaacatcatcaactaccaaatcgtcttagccgatggctcgatcgtcaacgccaatgaagccgagcgaagcgacctgtactgggctctcaaaggtggtagcacgaactacggcatagttacccgctttgacatggcgacgttcccgttggatcaaatgtggggaggatctctctactacaacatcagcctgggccctaccctcctcgattatctcgtcgggtttacggagagactcgccgtcgatgccaatggcctattcgcgctgtctatcgcttggaacgcagccaataatgattacctcatttggtcaccgaacgcctacctcgcacctacacccttcccaagcccactctacgatggactcgaggaaatcccgacggtgcgcgataccatgcgcatcacaaacctcgtatctgtcacagacgaaatcaatatgtcatccccaggcggaagccgaactcagtggttcgctttggtgttcaaggcagacgcgaccctgccttgggatatctatcagaagggcgctgatattatggcgccgttccttgggaaggaggggacctcgtgggcgctcacgttacaacccattaatgtcggcatgatcgctgctgctgcgaatcgtggaggaaacccattcggtctcaccgaaaaggatggcgatctattccttcttttgatatccatcttctggactgacccagaggacgacggaaagatcaaggctacgacgcaagacttcctgcgatggtcgacggacactgccaagcagcgcaaccttctcaatcgtttcatctacttgaactacgcgttggatacgcagccagtcttagcgagtttcggggacgagaacgtcaggcgtatgaaggccgtgcagaagaagtacgatccaaagggtctgctcaaagtgtggaaaggtggatacaagcttgacgaagtatag

SEQ ID NO: 474 - DNA, 1617 bp, Pleurotus ostreatus
atgagcgcgaatgtatcatggatccccacagcaccggcgacgttctggtcttcaccaaacgaccaattctctacatggcctaagctcgctgtgttggcgttatccaccttcatcattcatcgactgtacaagtcggcgtcgttgaacatgaagctgccccccgggccaagggggtggcccgttattgggagtgtattcgatattggaccacatatgtggctcacgttcacagagtggaagaagcaatatggaccgattttctatgtgaacctcgcagggcgttcgatgatcgtcttgaacacccacgaagtcgccacggagctccttgataagaggtcgtccatctactcagacagaccccgccatatcgtcgcctctgagatcatgtcaggcgaatacctactcggattcatgcatttcgacgataagtggaagcgtgtcaggagaggttctcatgaggcgatgaacaaccaaatcaccaaaacctaccgtccgttcatgcaagtcgaaggatacctcctcgccgacagcctcatgaaagcgccttctatgtggaacgatcacatcaagcgttctgcggcatctttcatcatgtccgtcgtatacggcaccaagtccatgcgcacctccaccgaccccaccctcatcaccctccacaagtttctgaggagatcgctcggcgcggccgctgggaagtactgggtcgagttcttccactttttggagtacatgccaaggtggttggctccgtggagggtggaggccgaggagtggttcaagacggacagcaagatgttcgaggggttctacaaccaagttaagaagaggatggccgacggagacaacaggccgtgcacagttacgactcttatcgaagaacaaaaaaagaaaaacctctctactatggaatcagtctggctggcagcggctatgtacggtggaggctccgaatcaactgctggatccctcggctggtggataactgccatggtagtctacccctccgccctccgcgccgcccaagaagagctcgatcgcgtcgtaggccgagaccgtatgcccaccttcgacgactatgaccacctcccctactgcagggccatggtcaaggaggtcttgaggtggagacccgcaacccccctcggtgtcccccatcgcgtggaaagggatgactggttcaacggttacttcatcccgaagggaacattggttgtggcgaacatttggggcatgaaccacgacgagaaagtctacgggcccgacgttcacgagttcaacccggcccgtttccttgaaggatctggaaagcccctgccctcggtctcagataccaaggacgagggccatgttacctacggcttcggccggcgcatctgcgtcgggcgccacgttgccaacaacaacttgttcatccagttcgcgagcatggcttgggcatgcaatatccaggcgaagaaggatgcgcaggggaacccgatcatgcctgatgcggataagtgcacgtcggatttgacgatgcacaccgtcccattcgattgcgatataacaccaaggttccccgaagttccgtccatcattgcccagtccattgagttgaataattacggccaaatttga

SEQ ID NO: 475 - DNA, 1626 bp, Pleurotus ostreatus
atgagccacttctcatggtccaacatctccagcgcagcgccctcttcctcttcatacgctgagctctacccctctctcacgtcatggacactcagtgttccggtcgccatagtgctccttgtagcagcgcgttcctatatggcaaggcctaaggggaagcttcctcctgggccgccaggattacccgtcataggaaatctgcatcaactgacagataagctctgggtaacgctcgagaagtggactaaacaatacggccccgtagtctatctaaatatcgccggccaaaacacaatcgtccttggcacgcacaaagccgccgccgatctcctcgatcgtagagcgggcatctactctgaccgaccacgaaatatcgtcgcaggagagctgctgacgggcggtttggtatttgcgttcgctcagcataacgatgtttggaagcggatgagaagggcatcgcatgaagcgatgaataaccaagtcgccaagtcctacttcccattccaagagactgaatcgtctctccttgtctctgagctcctcgcttccccggacctctttgactcccacctccgccgcgcgtccacgtctctcgtcttatccatgatctacgggctgcctcccatggaagacagcagggaccccgtcatcttgcgggtgaatcatttcacggagagggcgctgaaggcggcgatcccgggcgcgtatttggtggagtacttcacgtggatggagcatttgccgcggtggatgtgtgcctggagacgatatgctgaggatgcattcaaacgcgattccgtcctcttcgaaaacctcttcgctgatgttgtgacccgcctcaaaagcggtgatcaacgccccagcgtcgctgccaccatcatcaccgaacaagagaagaagaacctcacggataaagaagctgcctgggtatctgctacgctctatgccgctggtgctgagacgacatcgggccaactcgcctggtttatggaggcaatggttctctaccccgaggtgcaagctcgcgcgcaagcagagattgatcgcgtcgtcgggcgcgataggatgcctacattccaggactacgaccatcttccatacatcaaggcaatggtgaaggagacgctgaggtggaacggcgtcggcagattgggtgtcccacacaggctggcccaggacgattggtacgaggggcacttcatcccgaaggacacgatctgcttagtgaatgtttggggattgaaccacgatacggaggtctacggtcctgacgtcgatgatttccgcccggagaggttcttgaacgaagaaggggagctgaaggccatgccaacagataccaaggacgaagggcacgtaacctatggcttcggaagacggatttgtgttggccgccatgtctccaacaacagcatgttcatcgagatcgcctctatcctgtgggcgtgcaatattcgccctgggaagaacgaggctggagagatcgttatgccggacccgcagaatagtatcgatgaggggcttgtagtccgtccagcacccttcctgtgctccattaccgctaggtcgcctgaagtcgagactatcctcgctgagacgaaggatcgtcatggtttacctatttag

SEQ ID NO: 476 - DNA, 1521 bp, Pleurotus ostreatus
atgcgcgccgaggcttaccttgctctattcgcactggcgacaaggtcgttcgccaccacccagcagccacttcagacacaaacgtttgacgaaggagtgcggactacagcactacaatgttgcaacgcactcgaagacatcctaacttcctctaccatcctatatcccgcctcatctaaatattccgcgcagtcatctacatattactccctcgaacaagccgcccaaaagccagcgtgtcgcatagcccccgccacaaccgaagacctctcccgattaataaaattcgcgactgccacaaggtgcgagttcgccgtccgcgctggcggacacatgagctgggaaggctcgtcgaatatcggtccaaacggatttaccatcgaccttgggggcttgaaggaggtggaactgaaggatgatgggaagacggtttctatcgctcctggtctgaaatggtcagaagtttatggattcctgaagccacacgggcttcacacggtgggtggacgctcctcaggcgttggcgtcggtggtttccttataggaggtggtgtctccttcctgtcaacggaaatgggtctcggaagtgacaacgttctcgattacgaagtagtccttgctgatggatccatcgtccacgcaaacgagtcagaacgctccgatctttactgggcgttgaaaagcggcagcaccaactacgggatcgtcacccgtttcttgatgcccacaataccccgccctcagatatggggtggctcgctcttctatcacgggagtgcgggtcccaggctattcaagcaacttgctacgttcaccgatcgtctcaaggaggatcctcacggcatgtccgccatctccgttgcgtggagtccagaaatgaaagactacgctatctggtcccccaacgtctacctcgcgccacaagcatacccctccccccttttcgatggcctccaagatatcgagccattccaaagcacgatgcgcgttgcggatctaggcgagatcacggacgaagtagacatgctctcgccgggtgggcggaattcgcagtggttttctgtcgttttcaagaatgatgcagagctgccttgggatattcagctgaagggcagggaaatttttgagccgtaccacgatcgtcccggtgccgcatgggcgatcaccgttcagcccatcaacgaaggcatgattgccgctggacacaagcgagggggaaacccgttaggcctctcagtcgaggatggcgatcaactccttctacttggctgcgtcttctggaacgatcctcaagatagtgccgtcatgaaggccaaaacccaagagtacatcaaagcagcgacggagttggctcgcgaacgtggactgctgaacaagtacatctacttgaactatgcattggatacgcaaaacgtcctggagagctacggcgcagggaacctgaagaagatgagggaaatcaagagtaaatacgaccccgacaaccttctggaagtatggaaggggggctggaaattgtaa

SEQ ID NO: 477 - DNA, 1518 bp, Pleurotus ostreatus
atgcgatcctacgccacctcgttgcttctctttggtcttcttgccccttctcgcgcagcgactgtggcacatgacttacgggaggaaatagcggctagagactgctgtcagacgttgcagagccagttaggcccgacagcggttctgttccccggttcagcgggcttccaacagctcgtaaactcgtactacagtgcgcaagagtcagagatcatctcccaatgtcgcgtcagtgcgcatagtgctcaggatgtttccgacgccatcaagattatcaccaagggcggctgcaagttctctgttcgctctgctgggcacatgacttgggctggcgccgccaacattcaagctcccggtgtcgccatcgatttgaagcagttgaacggagttaatgtctctgcggacaagaaggtagtcagcttgggtccaggaggatcttggggccccgtctacgatgcccttgaccccttcaacatcaccgttgtcggtggccgttcgaacaccgtcggtgtcggcggattcatccttgggggcggcttttcaaacctttcccctgcccacggcttcgcatctgacaacgtcgtcaactacgaagtcgtcctcgcagacggccgtatcgtgaacgccaataagacttccaaccccgacctcttccacggtctcaagggcgggagcaccaacctcggtatcatcactcgttacgatgtcaacgccttcccccttacccctaagtggggtggaagcaggggttacaacgtctcccagggcccggccatcttcgacgctatgatcaaattcatcaagaagctcccccaggagcctctcggcggcggatccgtcgtttggggatacagcgaggatctgaagaacgacaccatctttggttcattcgcctacctgggtgccgatgccacagagtccaaggcccagctcttctccgagatgctcgacgtcccgcccaccttcgacaccattcgcaccaacaccgaccagcaatggctcgacagcgaggttgacgttgcattcccaggcggcctgagacgcattttctcgactttgaccctcaaggtggacagggaaatcgctgagggcatctaccggaagagccacgacgccttcgctggcctcgtaggaaagccgggcgtctcatggaccgcttccttccaacccatttccatcacccatctccaggctactgagcgggctggcggcacgccacagggcttgtctcccgaagacggtgacctcatcttgctcaacctaaacaccgtctgggtcgaggaatcagatgacgcagcgatgcaagcagctgtccgcgatgtcatcaactggggaactaaagaggccaagaggcgcaacgtgctccacccttggctctacatcaactatgcgctgcccgaccagaaggtctacgagtcgtacggtaaagcaaatgtcgatgcgcttctcaagatcaagaataaattcgacccgaagaacaccttcggaaagctctggaagggagggttcaaactatag

SEQ ID NO: 478 - DNA, 873 bp, Pleurotus ostreatus
atggctcctcaagtttggttcattactggcgcatctcgcggtctcggccgctctgtgactgagacggtcttgcagaacggcgatatcgtcgtcgcaactgcccgcagcacttcagtcttctccgatctcacatccaagtaccccgaatcccagctccttgtcctctctctcgatgtctcgaacgtcgatgcaatcaaggctgctttcaaggctgcgaccgacaagttcggacgcatcgacgttgtctacaacaatgctggtgccttcactgtcggagaggccgaggctatccccgaagccgatgcccgcaagctgtttgatgtaaacttctgggctgcttccaacgtcgctctcgaggccgtcagagtcctccgtgaggtgaacaagccccaaggaggtcgcatcatcaccatcggctctgctactggcttcgcaccgttgcctggctcgaactactacgccgcatccaagttcgcaattgaagggttcatcgatgcgcttagcatggaactcgaccctgcctggaacatcaggctcacccttgttcgcccgggtggatacgacacgggctgggaaaagggcgcccaattctaccccgcccaccctgcgtacactgctccacacatgccgacagagttcggtcgccagtacatgaagacgttcaaaggttacgagggcgacccagtcaagttcgcgcagactgtgtacttcaaggttgccaaggccgaaaatcccccgtcgaaattgtcgcttggattggactgcgtcggcatggtcgagggaaagttgaaggctatttccgacgaggccgaaaaatacaagagctggtctgccgggctgaacaagtccgacccccctttgaacttcgcttga

SEQ ID NO: 479 - DNA, 2838 bp, Pleurotus ostreatus
atgccaggttcactaccccatgaccatgctgcaggagctcactctcttgacgcgttgagcccctctgatcagctgttcttcagaacacattcatttgggcccaccaaggaacccccctcgctgtgcatccatcacgcattcgagagccatgctgcatcgcaccccgaatccctcgctatcatgacttcggacgtctcgggcgcctcagagtccgttacctattcagagctcgatcgtcgggcaaatgtacttgcccagcaccttcgcgatgttcatgacgtcgtcccgggtcgccgtgtttgcttcctggtcgagcgatcggtagacatggtggttggtatactcggcatcttaaagagcggcgcggcctatattctcttggatggaaacgtcgtcgattactcgacccttgaccacgtccttcgcgacggcgatgtgacgttatactcgcgcaaattcttaccgaaggcatcgacaaccacttccgggtcgatttgtcttgaggatgtcctcaatgccaacgaaaattcgaagtgtgctaagcctgcggattattcaaagcctgacgataccgcgtatatcttctacaatagcacagaagacggccaagtagctcacaagggtgtgcccgttttacacagacacgtcattaatgttgtttgcctcgctcctggtaacattgagatggcgccgggccgtagtgtttctcaaatcatggacgtttccacaagcctggcagcctgggaaatccttggtagcctcgccaatggatgcacgctctgcttggggagccgcgactccaacgactggccgactgtggtgaggaaggccgacattgtgattgcgacaccttcaatgctcgcggcctatgaatcagcggactacccaaacgtgaaagtcatcgccgtcgtatcggaccggtgctcccaagctcttgctgacaagtgggccgccaacggtgtccatctgtacgttgggtgtgctttaactgagattgcaatcattaatacaatggcctcggaatatcacattcttggccaggctttgagcatcggaaaaccactacctaataataatgtatacgtgctacagtcaggtgccgatggactgcggccactagcactaggtgaccccggcgtcatatgggtaggtggaatgggattaacgaagagttccattaatatcgacgacgacaaatataagttggatcccttccttgccgatggatcctacatggtcaatactgggaagtcaggccgttggcatccagatggaactctagaatgccttggttctgaaacgacaacgatggtgggtgaagctgagacgaatgatggagacttggcgacgataggaagagaactcctggcaaaggattctacaaacacacttttccagactcccggccatcagcatttcaacctacctcttaccgtcggctacgggacatcggagaagaccgccgcgggcttggattcgtcagcctcctcttctactattgagaaaggtcacgaagtcttttgggcgggctacgaagacgatggtattccagacaagacgcagggaaaatttatgcgcaatttgcggcatcaggttttctctttgtaccgccggctgtttgggatcgtcttcatagtcaacatggcaatcctcatagcgaccttcgtccaaggcgaacccaatgccatgcagctaggccagatcgtgataggcaacatcttctgttctgtcctgatgcgtcaggaacatgtgatcaacgcgttctttgctgtatttactgcagtacctccatcctggccgatggctatccgtcgagtgtgcgccagagtgtacgggatcggaggcatccattctggggctgcggtatcagggacagtgtggctcattgtcttcgctgttcaagcgaccagggagcttgtatcgggtggacccacttcggtagccaccctcgtcgtgacgtactgcatcctgcttttgctcatatccatcatatgctgcgcatatccagccttccgcatcgcaaagcacaacaacttcgagcgtacacatcggttttttggttggacagtaacggcgctggtctgggcgcaagtcatcttattaaccaacgattacaaaagcgcagagacatccctgggctctgcgcttgtttcttcgcccccattttggctagtagtggtgttgacgtgctcaatcatctacccgtggctgcacctgcggaaggtcccagtacgcgcggaaatactgtcgtcgcacgccgttagactctactttgactacgtcacccctgaccctggaacattcacccgggtgtcagataacccgctatttgagtggcatggctttgctaccatcgcccaacccgggcagaagggctactcaatggtcgtctctcgcgcaggtgactggacgtccaagcagattggagacccaccaaaggagctctgggtgcggggcatccctacttgcggagtaatgagtatcgtccccatctttagacgagtggtcctcgttgcaaccggcagcggtattggccccatcactccgtggatccttcaaagtcggcacccagtgaagctgctctggacggctcctgacgttaggaagaccttcggagacaaactcgtggactcgctcttggacgcttgcccggatacggtcatctatgacactcgtaaacacggaaaaccagacatggtcaagctgacataccgccttgttcgcgagtttgatgccgaggctgttatcatcatctccaaccagaagcttactgtgaaggtcgtatacggaatgatgagtagagggatacctgcctttggggccatttgggattcatga

SEQ ID NO: 480 - DNA, 3156 bp, Pleurotus ostreatus
atgccaggatctctatctaacggccgagcggtatctggaagccttctttccactctaaccatttcggaccagctcttcttcagcaagcattcgtttgggccgatacagcagtctccgttctcctgcatacatcacgccttcgagtctcatgtcgaatctcatccccaatctctcgccgttgtggacccgttcgcgcccagcgatctgaagtcaattacctactcagagcttgatcgacaagccaattttcttgctcgacatctccgcaatatccatggcgtcgtgcccggaaaacgtgtttgcctcctcatcgagaggtcgatcttcatgattataggcatagttgcgattctcaagagcggcgctagctatattcctttggacggaaacatcgttgccgattcaaccctcagccacattattcaagactcggaggcaaactgtgtgctttcactgcgcaaatttgcatcccgggtcatttcagcgaacgcgacatccatctgcttagaggatgttctcgctaccattacggatgacgagtgcggcaaaccagttgatttatctaatcctgacgacagcgcctacattgtctataccagcggcactacaggcgttcccaaaggcgtagatgtgatgcaccgaaacgtcacaaacctcgtgtgtcttgctcctggtaacatcgagatgcgcgcaggtcgcggggtctcccagctcatgaatgtagcgtttgacatggcggcttgggaaattcttggcagcctcgctaacgggtgcacgttgttcttgcggggcaaatcctcgaaggactggcgcgcggtgatgaagatggtggacgtggtgattgccacaccttccatgctctttccacatgatcctgttgattatccgaacatcaaagtcgttgccgttgctggggaagtatgccctcagaatcttgcggacaagtgggctagcaatggcacccatttctataacagctgcggacctacggagatcacaatcgtcaatactatggtgcctcatcatcacgtatcgggagagtcgctgagcatcggaaagcctactccaaacaacaacgtatacgtactacatcgtgatgcagaagatctcgctcccgttgctattggacagcctgggatcatgtgggctggtggtgcaggcatcacgaggggctacctcaacttacccgacaaaacggaggagaggtacaaactagatcctttcgtcaacgatgggtccttgatgtttaatactggtgaccttggacgctggcgtccagatggcacgttggaacatctcggccgcatagatgatcaggttaagatcaagggattccgtgtagagcttgatggtgtcggtgctgcaatggagacctgctccggggtgaaggctgccgtcgccctccttattgatgatgttctttgggggttcttcacaccctctacagtcgaaccgaaggacgtacaggcggcagtggcgaagattcaaccatattacgccgtcccaagtcgattcattcatatggaagaattcccgaacacgatcaatggaaaagtggacaagcgagccctccgccggaaggttgaggaagaaatcgaggtagcgacgcatagcgacgccccgaagagcgttgctacgacgggagcttctgaaagttcgccaacaatcgacagagaacttctcagcaaggactcttcctccacgctttcgccacctcctatctatgaagaacgcgagatttcggagaaagagaagaaggatgctcctgggctggaagtgtctgtctctgccctgtcatcctcgagcatcgagaaaggctacgaagtctcctgggctggctaccaagacgatgacgtccccaacaaaactcaagggaaattcgttcggaacatacgacaccaaatattttcattgtatcgtcgactttttggtgtggtctttgtgacgaacatagcagttctcatcgctaccttcgctcagggggaaccgaactctctgcaattggggcagatcgtcatagcaaacctcttctgcgcaatccttatgcggcaagactatgttatcaatgccttcttcaccctcttttgttctgttcctccatcctggccaatggcgattcgtcgagtgtgcgccagggtgtatagcattggcggtttgcattctggttgcgcgatctcagggactatgtggcttgtggcgtttaccgttcaagcaacgagggagctggttcagggggggccaatttcaatccccaccgtcacgataacttattctattctcctcctacttctcctcattatattttttgcatacccagctttgcgtacgtcgaagcacgacaacttcgagcgcacgcatcgcttctttggatggtcatgtacggccctggtgtgggtccaggttgtcctcctaaccaatgactacaaagaacctgggcttgcgctcggttcggctctcgtcaaatcagcaccattttggctggtcgttatcatgacgtgctccatcattcttccatggcttcgcttgcggaaggtccccgtgcggacagaggttctctctacacatgccatacggctctacttcgactacggtgagacgcttacgcccgtctctggatcattcacccgtatctcggaaagccccctgttcgaatggcatggcttcgccactatccccgagccaggaaagaagggctattccctcgttgtctctcgtgccggcgattggacgtccaaacaaatcgcagatccgccgaaagaattgtgggttcgcggaatacctacgtgtggtgttttgcgtattgttcccatcttccggcgcattgtccttgtggcgactggcagcggcatcggtccttgcacgccgtgtattctcgagcagcgtttgcccatcaagctactttggacctctccagatgtccgcaagacgttcggcgataaactcgtcgactcgattctcagtgcgtcgcccgatgcagtgatatacgatactcgcaagcatggtaaaccagatatggtgaagctgacgtaccgccttgttcgggaattcgacgcggaggcggtctgtatcatctcaaaccagaaactcacaaagaaggtcgtgtacgggatgatgagtcgaggtataccagccttcggggcgatctgggattcctga

SEQ ID NO: 481 - DNA, 846 bp, Schizophyllum commune
atgttcagccttctccgacgacacctttacaccctcttcctcttcacgtacagcgacatgaagaccatcttgcttccaataactgtctttgcctcggtagcagcacctgcgcagtcgccacaaggcctcctactcggagtcttctggacatggttgcaccagctccacgccaacctctcaaaccagtacaaggcgctggaggaagacaagatgaacaagccctggagacccttgcccgcgcaccgcgtcactccccggcaggccgagctcctgcgctggaccctgatcccactgacgatcggcttctccactatcggcggcccacacgccatcgccgccagtatctggctcgcaacagccttggtcatctacgagcagccctccgtcagcggccactggctcggcaagaacatcctcaactgcgccggctacatcggtttcgaatacggcgcaacagcaatgctgggcgagggcaggcctctgagcgcgtcggcggtgctcttgctgctatgcagcggcctcgtcatcctcaccaccatccacgcgcaggacttcgccgacatcgccggcgactccgccctcggccgcgtcaccttccccatccgcgcccccgccctctcccgcgcgttcatctacctcggcatcccgctcctctccctcgcgctctccgtcgcctgggatatgttctgggcggcccgcgtactgttcctcgcgctcggctccgcagtcgcgtggcggttctacgccttccggacgatctcgcaggacgcgcggtcgtatgtgttgtacaatgtatggctattcagtgtacaccttttgcctgccacgcagcggcactggatgtga

SEQ ID NO: 482 - DNA, 1482 bp, Schizophyllum commune
atgtcgtatgctcttttggcagcaggcgcggcttgcatcttgctcgtcgggaatggcctctacaccctgctgtggcatcccctcgcctcataccctggcccacgacttgcggcgttgacgaagtggtaccgcgcgtacttcgacctcgtccacgatggcggttggcttgagcacctggaggagcttcatcgtcagtatggccctgtcgtacgcgtcgctgcttctgaactacacttcgcggagcccgcagcataccatgacatccacaacttcacaaaccgttttgcaaaggaccccgagttgtatcgtgccttcgacctgccacaggcgtccttcgggcaggtggatcctgtcgcggcgaagacccgccgcgacaccttgggaccactcttctcacgtcaaggtattcgcaagttcgagttcgtcattcaggataaggtcgacctcctcgtcaaccgcctcatcgaggagggctccacccgccagcccgtcaaccttttcctcgccttccgctccttcagcttcgacaccatcatgtcctactgcttcgccacctcctaccactccctcgagcacgaacgcttcgcccaccccatgatccccatcatctttaaggtcaacgtcctcacctggaccctgcgttacttccccttcctcatgagccttgtgcgctacggtccgcgcttcatcacctcccggctctcgcccgtagccgttggcttccagggcctgttcgaccactttgacaagcgggtggatgaggtgttgagcgagccggagagcctaggggccgccgggcatgatacggtattccatcatctgatcaatgggaagagagagagaccgagcaaggaggtgctgatcgaggaggcaatcacactgtttggggcggggagcgagacgacggcggcggcggtgacaacggcgattttccatgttctgaacgacaagcgcatccgcgagagggtgatggaggagctaagggaggcatggccagatccgacgatgcggttgtcggcgcaggagatcgagaagctgccgtatttgacagctgtcatcaaggaaacgttgaggttcgcgccaggtgtcgtcactcctgcccctcgcatcgtgcatcaggactccgtcatcgcgggccacccaattcctgctggaacgaccgtggccataggtgccacattcgtgcaccttaacccggaaatctacgaggacccaaagaggttcaagcccgagcgatggctgaaggagggcgcgcaggcactcgagagtgcatactttatccccttttcgaagggcccgaggatgtgtctggggcattaccttgcgtggtgcgagatgtacctcgtccttgcgaacgtcctacgcaagacggatatcactgtgttcgagaccgatgagacggactttgagttccgtcaatactggatgcccatcttccgaggacgacagctgaaggggttcgtcgagccgagaattgactaa

SEQ ID NO: 483 - DNA, 792 bp, Schizophyllum commune
atggcctccatcctcaagtcgaagtgcgtcctcgtcaccggcgcgaccgcgggcatcgggcgcgcgctcgctcgcgccatccgtgacctcccctcgaagccgactgtcatcgcgatgggccgccggcaggagcggctcgatgagcttgcgaaagagggcttcaagacggccaagttcgacatgaacacgacgcccgacaagatcagggcgttcgtggatgatatcacggcgcagtacccggagctggacgcggtcatcctgaacgcgggcgtgcagtatatcttcgacttcaccaagcccgagagcgtggatttcaacaagatcagcaccgagttcaacgtcaactacctcgccgtcgtgagcatgatgacggccttcctcccgcacctaatcaagatcgggaaagagcgccccaccctcctcgtcccggtgacctctggcctcatgacgatccccctaccgagcacggcgaactactctgcgacgaaggcggccctccacagcatctccttctccatccgcattcaaatggagaacgccaagacaaacgtgcacgtcctcgagattatccctcccctcgtcgagtccgagttgcacgacaaccaaggcaccacggaggctctgtccagattctggatgccccttgccgactttatcaacgtcgtcctcgacggcctcaaggagggcaagatcgccatcaccgccggcgcggccacctcagcgtacctccagttcgagaagggcaaggagagctaccgcaatgggctcatggggctgccagttacgcagtaa

1.-9. (canceled)

10. A method for producing a small molecule for modulating a first target protein, the method comprising:
selecting, from a database comprising a list of biosynthetic gene clusters, one or more gene clusters that include or are positioned proximal to a region that encodes a protein that is identical with or homologous to the first target protein,
expressing the gene cluster or a plurality of genes from the gene cluster in a host cell; and
isolating a compound produced by the gene cluster.

11. The method of claim 10, wherein the one or more gene clusters are selected from the group consisting of (1) clusters that comprise one or more polyketide synthases and (2) clusters that comprise one or more non-ribosomal peptide synthetases, (3) clusters that comprise one or more terpene synthases, (4) clusters that comprises one or more UbiA-type terpene cyclases, and (5) clusters that comprise one or more dimethylallyl transferases.

12. The method of claim 10, wherein the protein that is encoded by the region that is included in or positioned proximal to the biosynthetic gene cluster is identical to or has greater than 30% homology to the first target protein.

13. The method of claim 10, wherein the region that encodes the protein that is identical with or homologous to the first target protein is within 20,000 base pairs of a region of a portion of the gene cluster that encodes a polyketide synthase, a non-ribosomal peptide synthetase, a terpene synthetase, a UbiA-type terpene cyclase, or a dimethylallyl transferase.

14. (canceled)

15. The method of claim 10, wherein selecting the one or more gene clusters comprises operating a computer, wherein operation of the computer comprises running an algorithm that takes into account both an input sequence for the first target protein and sequence information from a database that includes sequence information from a plurality of species such that the computer returns information corresponding to one or more gene clusters.

16. The method of claim 15, wherein the algorithm takes into account the phylogenetic relationship between gene clusters in the database.

17. The method of claim 10, wherein the one or more gene clusters include a coding sequence for a protein that is an extracellular protein, a membrane tethered protein, a protein involved in a transport or secretion pathway, a protein homologous to a protein involved in a transport or secretion pathway, a protein with a peptide targeting signal, a protein with a terminal sequence with homology to a targeting signal, an enzyme that degrades small molecules, or a protein with homology to an enzyme that degrades small molecules.

18. (canceled)

19. The method of claim 18, further comprising screening the isolated compound for modulation of an activity of the first target protein.

20. The method of claim 18, wherein the cluster-encoded protein that is homologous to the first target protein is resistant to modulation by the isolated compound when compared to modulation of the first target protein.

21. The method of claim 20, wherein the compound is not toxic to the species from which the cluster originates due to one or more of (1) sequence differences between the first target protein and the cluster-encoded protein, (2) spatial separation of the compound from the cluster-encoded protein and (3) high expression levels for the cluster-encoded protein.

22.-33. (canceled)

33. The method of claim 10, wherein the gene cluster is a gene cluster of a non-yeast fungus.

34. (canceled)

35. The method of claim 10, wherein the first target protein is a human protein.

36.-37. (canceled)

38. A system for identifying one or more biosynthetic gene clusters for introduction into a host organism to produce one or more compounds that modulate a specific target protein, the system comprising:
a processor;
a memory containing a gene cluster identification application;
wherein the gene cluster identification application directs the processor to:
load data describing at least one target protein into the memory;
load data describing a plurality of biosynthetic gene clusters into the memory;
score each of the plurality of biosynthetic gene clusters based upon:
performing a homolog search for each biosynthetic gene cluster to determine a presence of at least one homolog of a target protein within or adjacent the biosynthetic gene cluster;
confidence of homology of the at least one target protein to at least one gene in a biosynthetic gene cluster;
a fraction of a homologous gene that meets an identity threshold;
a total number of genes homologous to the at least one target protein present in the entire genome of an organism;
homology of the at least one homolog of at least one target protein within or adjacent the biosynthetic gene cluster to genes in the target protein's genome;
phylogenetic relationship of the at least one target protein to a gene in a cluster;
expected number of homologs of the at least one target protein in or adjacent to a biosynthetic cluster; or
a likelihood that at least one target protein is essential for cellular process in the natural environment; and
output a report identifying one or more biosynthetic gene clusters that are most likely to produce a compound that modulates the at least one target protein.

39.-40. (canceled)

41. A method for producing a compound that binds a protein of interest, the method comprising:
obtaining sequence information for a plurality of contiguous sequences, wherein each contiguous sequence includes a biosynthetic gene cluster and flanking genomic sequences;
analyzing the contiguous sequences for the presence of a gene that encodes a protein with homology to the protein of interest, and
selecting a biosynthetic gene cluster which includes, or is proximal to, a gene that encodes a protein that is homologous to the protein of interest,
expressing the biosynthetic gene cluster or a plurality of genes from the biosynthetic gene cluster in a host cell; and
isolating a compound produced by the biosynthetic gene cluster.

42. The method of claim 41, wherein the contiguous nucleotide sequence is less than 40,000 base pairs in length.

43.-76. (canceled)

77. The method of claim 10, wherein the first target protein is a mammalian protein.

78. The method of claim 18, wherein said host cell is a yeast cell.

79. The method of claim 18, wherein each expressed gene of the plurality of genes from the gene cluster is expressed under the control of a different promoter.
